United States Patent Application Publication US 2025/0205292 A1 - sequence listing, part 11

SEQ ID NO: 17 - DNA, 2407535 bp, Bifidobacterium breve
  source 1..2407535: mol_type = genomic DNA
atggttgatgtttccggtgaccccacaatcgaagctgcccatatttggtcaaacacacttacccttcttaagcgcaacagcactctgaccgcacgagagaagggatggcttgagggaatagttcctgaaggtgtgttcggctcaaccatcgtgctgtgtgtggataacaatgacacactgcaggccattcaaggcaatctcaacgaatcattgttgcaagcactgcacaccgcaaccggtgagaacatgttccccgcgttcaaagtagtgccgcgcagtgaaccgcaaccggtctccccttatccaacgaatgcttcgccgactctcactgatttcggcaaggaaccgtatggcgcgccggaacctgtgattcctgctgttgaacaacagttctctgtgccgcagcaaaaaatgaatcgcgatccggaaactcatctcaataagagtttcactttcgattcgtttgttcccggtgactctaatcgcttcgcgcgaactgttgcattggctgtggcagagggatcaggccaggatttcaatccgttgtgtatttatggcggttccggtttgggcaaaacacatttgctcaacgccatcggcaattacgccttggtaaaggatcccggcctgaaggttcgatacgtcacttccgaggaattcaccaacgactttattgacgctctgcaaaataccaatcagagtcaaggccagatagcggaattcaaccgccgatatcgccaggtagatgtgctgcttattgatgatattcagttcctaggcggcaaggaagccactctggatcagttcttccatacgttcaattcgctgcatcaagcgaataaacgcattgtcattgcgtctgatgtggctccaaaaaacctgaaaggttttgaggctcgactgatttcccgctttgaatccggcctgaccgtggatgtcaagccgccggatttggagacacgtatcgccattctgcgcatgattgccgcaatgaacggatcgaagattcccaatgacgttctggatcttattgccgaacgtttcacggagaatatacgtgaattggaaggcgcgctgacccgcgtcaccgccgttgcctcgctgagcaaccagccggtgacccgcgctttggcggagcaaacgcttcaagacttctttaccaccgatgtggaaatcaagcccaccgacatcatcggtcaagtggcaaagtacttccacttgacgtttgaggatatcgtcggctcatcacgtaccaagaacgtggtgattccccgacagatagccatgtatctcgctcgcgagatgaccagcatgagcctgatggatatcggcgaggtgtttggaggtcgcgatcacactacggtaatgcatgcttgcacccgtattggcgacaaaatgcagcagaaacaggaaatctataactacgttatggaactgactgtgcgtttgaagcagaacgcagactgagtatgcctatggcttcctttacgggagccattttttatatctgcgcatatccgagagaatcgttcctgaagaccgattttggcactttttcaaaccgagccagaaaaagtgccgaaaaccgtcctcagaatcgattctcctcgccgataatcatgttcaacacgccgtgcaaagacccaataatcatgaaagttatccacatagttgttcacaaatgtgggcaaactcggcggataactcgtggattacccactatttttcggtggaaaattggtgcataacatggtcttctgtgtggaaaacttaacaattgactttttcctgtggataagtcgcctatttatccacacgctatacagaagttatccacaacactccccagtggataagccgttaccgcagtagccctccatccacttatccacactatccaccgcacttattacgacgattacttacttgcatacataagatcaccgtcatggtgataatcggccgcatcaagcacgcaagcaaaagaaccaaccaaccgctagaatgttcttcagcaaaaccgacgaagggaacaacctgacatgaaagtcgaaatcgataccgccgcattggctgatgccgtggcctggacctcccgcgtcattgacgctcgtccctccaacccaattctcgctggcgtaaaacttgaagccattgacggcaccctgcagttctctgcattcaattacgagatttccgctcgtcaccacatcgaagctggtgttgatgaagtcggttccgctctggttctgggcaagcttctggctgatatcaccaagtcgctgcgttccgaaaaaacctacctgaccaccgatggctccacgctaaccatcacctctggcaagtcgaagttcacgttgcagctcatgcccgatgccgaataccctgatttgccggttgtgccgcctatgctcggccaagttgatgcccaaactttcgtccaagccgtgaaccaggcatccgtcgccgtctcccgcgaagaaaaccgtccggtactgaccggcgtgcgcatgcagttccaggacgacaaagtcatcatgacctccaccgaccgcttccgtttggctcgtgccgcgttcacctggaccccgcaagacgccaatgtggacaccatcaccctagtgcgtggctctttgctcaaagacgtggctcgttctctggacgaacaccagaacatccgccttgatttcgatgccgataaccccacgttgctcggttttgaaaatgccggtcgcgtatccacttcgcagctcatcgacggtgagttcccggctgtcgaccgcttgttcgccgatgaatacccgattcaggccgtagtgaacaagcaagatctgcttgacgccattagccgtgtggctctagtcgccgagcgcaacgccccgatccgcatgatgttcaccggccaggagctcgccttgtccgccggttccgccgacgaagcgcaagccaatgaaacactcgatatcgatatggatggcgacgaaatcaccgtggcgttcaacccgtcctacctcaaggaaggtttgtccgcgattgccgagccgtttgtacgcatcaagatgaccacgccggtcaagccggtggaattcaacgggcagcaggaagccgattccgatgaatcgatggactaccgctacctgctggtgccgatgcgctttaacagctgacgcagaatctctcacatactgcacatgcatatctcccgtcttgcactcgaccactaccgctcatggagccaggtagtggtcgatttcgtaccaggagtcaatatcctggtcggcaagaacggcttgggcaaaaccaatctggtggaggccgttgaagtgctctccaccggagctagtcatcgtgcctccagcatgctgccgcttatcgaacgcggccaaaccactgccactattcgcgccaacgtagtagacgacgatgggcaaagcaccacgtatgaggcatcgattcatgctcgcggcgcgaatcgggcacgcatcaattcaggaacctcgctctatttacgcgatatcatcggccgtattcccagcgtttcgtttactcctgaagaccagagattggtatcgggtgatcctggtgcccgacgaacgttgctcaaccaagccggagccctgctggaacccggctatatgcagtcgttgcatcaattcacacgcatcggcaagcagcgcgccacgttgctgaagcagcttggcgccagcgcgaatactgggcaaccggtggatgccgtattaagcggtttggaaatatggaccggacagtttatcgaagcaggtgtggaactgacccgtatgcgtgcgagagtcatcgacttgctggctgagccgtttgccgcgctgtacgctgagttgactggcaacgatgacaccgtcagcctgacgtatgcgccgtcatttgacgaagtgctgatgcaagacgatccacgattgagcatcagtgaacatttccagcgcatctaccctggagaagtggctcgaggcgtcaatcttatcggccctcaacgtgacgatttgaccctgaatcttgctgatatgccagcccgcgaattcgcctcgaacggcgagatatggaccatggcgctggccttgaaaatggcgctattccaagtgatacgccagagattgggccttaagcccatcgttatccttgatgatgtgttcgcccagcttgacgacaaccgtcgtacccagattctggattttgcgcgccggcaagatcaggtgcttatcaccgtggcgtcagaaggcgatgtgcccacgcatgaatcggacaatgtgcttgatattgcgcaattgatgccatccgccgcgcagtctgggggcgggagcgagacacaatcatgaagcctcccattgcctgtcagctgcatgtggacgaaaccaaactacccgcagaaatatttgaacgtctctctcaccgcggggcgatactgaaagaccgacgccgcagacgcgaggaagcctttgagaacttcggcaagcccggccgtgatccggccgagttgggcagcgtgatgagctcaatcgcaggcggtggcgtatgggctgcgaacatgaaattggcgcaattgcgcaaccattgggatcaggtggtaggcgaggcaatcgccaatcattcggcagtcgctgatttcaccgatggagtcttgactattcgtgccgaatccacagtgtgggccactcaactgacctatttgattccgcaactgaccgataccattcgcaggaatctcaaaggactgaccatcaacgaaatcagagtcaccggtccggcggtcggatacagccggaaatgggcccggcgtcgataacaccctagaataggggaaattcgtagaagccccgctatggcgctcgtcgtagtagacgagtagaatcacatgcaatatggtcaaatggctggaagagccctttacgggcctcataagccatatcgcctctgcaaatgaccttcattacagaggttgaccccgtagtcacggaaggaagcctgttggcagaagaaaccagcaaagaggagcagctgaaggcggctgcggaacgcatcaacaatgcggaattgaccgaaggcgagcttgacgaatccatggctcccgagcattatgaggcctctgaccttcgagtgcttgaaggtcttgaagccgtgcgtatccgtccaggtatgtacatcggctccaccggtccgcgtggtttgcaccacttggtctacgaaatcgtcgataactcggtcgatgaggcgctggctggatatgccagccatattgaagtcactatcctgccggacaacggtatccgcgtggtggacgatggccgaggcattccggttgatgaggttcctggcgaaggcgtctccggtgttgaaaccgtgatgaccaagctgcacgccggcggcaagtttggtggcggcggctacgcggtgtccggcggtctgcacggcgtgggcatctccgtggtgaacgccctgtccactcacgtggacatcgaagtgcgccgtcagggcttccactggacccagacttatgtcgaccaacatccggttgcgccgctgaaacagggcgagccgatggccgaggacgaatccaccggtacatccgtgaccttctgggccgacccgaagatctttgaaaccaccatctatgatttcgagacgttgcgttcccgcttccaacagatggccttcctgaacaagggcctgaagcttagcctgaccgacgaacgcgtcactgaccaggccggcgacgaagtggccggcgacgccgaaggcgagcccggtgagaagcaccaaaccgtcacctaccagtacctcaacggcatcaaggattacgtcgactacctggtcaaggtgcgcaaggccacaccggtggaagaggatgtcatcagcttcgaggccgaagacctcaagctcggcatttccgctgaactcgccatgcagtggactaccgcctactccgaggctgtgcacacctttgcgaacacgatttccaccactgaaggcggcacccacgaggagggcttccgtgcggcactgacctcgctggtcaaccgttacgcgcgtgacaaggccatcctcaaagacaaggacgagaacctgtccggcgacgacgtgcgtgaaggcctgacggccgtgatctccgtcaaactcaccaacccgcagttcgaaggccagaccaagaccaagctcggcaactccgaagccaagacctttgtgcagcgcgtgatgaccgacaagctcggcgactggttcgacgcccaccctgccgaggccaagaacatcattcagaaggccatcgaagcctcccgcgcccgtctggccgccaagaaggcccgcgaaaacacccgccgcaagtccatcttcgagtccgccggcatgcccgacaagctcaaggactgccagtcctccaacccggaagagtgcgagctgttcatcgtggagggtgattccgcaggcggttccgccattcagggccgcaacccgatcacacaggccatccttccgctgcgaggcaagatcctcaacaccgaacgtgccagcctggaccgtatgatgaagtccgacaccatcgaatcgctgatcaccgcggtcggtggtggctacggcgaagacttcgacatctccaaggtgcgctatcacaaggtcatcatcatggccgatgccgatgtggacggtgcgcatatcgccaccctgaacctgacgctgttcttccgctacatgcgtccgatgatcaccgccggttacgtgtacgtggccatgccgccgctgtaccgcttgaagtggaccaagggtccgcacgacttcgtgtacaccgacgctgagcgtgaccgtgtgcttgccgaaggcaaggccaacggtcgccagctgcccaagggcgaaggcattcagcgctacaagggtctgggcgagatgagctatcaggagctgtgggaaaccaccatggatcccgaacaccgcattctgaagcaggtacacatcgaggatgcggccgcagccgacgagaccttctcgatgctgatgggcgacgaagtggagccgcgccgcctcttcatccagcgcaacgccaagaacgtgcgttggatcgacgcgtaaaggaatcctccgcaagcggaggacacaattccttggctcccctctttgaggggagctgtcgaacgcagtgagactgaggggagcagtcactgcgacatggactcccctcggtcagctttgctgacagctccccctcagagaggggagccagataggactaaaggaacggtataagtggcagacgaaacaaacaacaccggtgacgaacagttcaccccggatggctcgatggagccgttgagcccgcaggaagcggacaccactgactacggtctgatggaaagcggcgaacgcatccagcgcaaggatttgcagcaggagatgcgcgaatcctacctagcctacgccctttccgtcatcgtggaacgtgctctgccggacgtgcgcgacggcatgaaacccgtgcaccgccgtgtgatctacgcgatgtacgacggcggctatcgccccgaccgcggctacaacaagtgctcccgcgtggtcggcgacgtcatgggtaaataccatccgcacggcgactccgccatctatgacactttggtgcgcatggcccagtcctggtcgatgcgcaacctgctcgtcgacggtcagggtaacttcggttcccctggcgacgaccctgccgccgccatgcgttacaccgaatgccgcatggccccgctggccatggaaatggtgcgcgacatcgacaaggacaccgtcgacttcgtgcccaactacgacggcaaaacccaggaaccgactgtattgccggcccgcttcccgaacctgctggtcaacggctccgccggcatcgccgtgggtatggccaccaatattccgccgcacaacatgcgcgaggtggccgaaggcgtgcactgggcgcttgagcatccggacgccagccgcgaagagctgctggaaaacctgattcgcatcatcaagggaccggacttccccaccggcgccaccatcctcggtcacaagggcatcgaacaggcctaccgcaccggccgtggcctcatcactatgcgtgccgtggtcaacactgaggagatcaacggccgcatgtgcctggtggtcaccgagctgccgtaccaggtcaacccggatcgtctggtcgtctccattcgtgaggccgtgcgcgacggcaagattcagggcatcgccgacatgcgcgacgaaacctccggccgtacaggccagcgcctcgtattggtgctgaagcgtgacgccgtgccgaaggtggtgctgaacaacctgtacaagcactcccagctgcagcagaccttcggtgccaacatgctggccctggtcgacggcgtgccgcgcacgctgagcctggacgccttcatccgccattgggtgaaccaccagctcgacgtgatcgcccgccgtaccgcatacctgaagcgtgaagccgaggaacgcgaccacatcctgcagggctacctcaaggctctcgacatgctggacgaggtcatcgccctgatccgagcctccgaagacaccgataccgcccgtaccggtttgatggagcttctggacatcgatcaggtgcaggccgatgccatcctagccatgcagctgcgcacgctgacccgcatgaaccgcgacaagatcgtggccgaacacgaggaattgcagcgcaagatcgccgactacatcgacattcttgccaagccggaacgccaacgcaagatcatcggtgacgaactcgacgagattgtgggcaagtacggtgacgaacgccgtaccaagatcctgccgttctccggtgagatgaacgtcgaagacctgatcgccgaagagaacgtggtggtcaccgtgacccactccggcttcatcaagcgcaccaaggccgacgaataccgcgcccagcaccgtggcggcaagggcatcaagggtaccaagctgcgcgaggacgacgtggtggatcacttcttcctgacctccacgcacaactggctgctgttcttcacgaacaagggtcgcgtctaccgcatcaaggcctatgagctgcccgagggttctcgtgattccaagggccagcacgtggctaacctgctgcaattcgcgcccgacgagtccatccaggccgtgctgtccatcccgaactacgaggtggccaagtatctggtgctcgctacccgttccggcaaggtcaagaagaccccgctggccgagtacgactccccgcgtcagggcggcctcatcgccgtgcgcctgatggccgacgagaatggcgagaatgccgacgagctgatcggtgccgcgctgtgcaacgccgaggatgacatcatcttggtctccaagctcggcatgagcctgaagttccaggccaacgatgagcagctgcgcccgatgggtcgtcagactgccggtgtgcagggcatgaagttccgcgagggcgacgagctactggccatggatgtggtatggggcgactccgacaaggatctgttcgtagtgaccaacgaaggcttcgccaagcgtacggccatcagcgaataccgcctgcagggccgtaacggcctgggcatcaaggccgtgcagctggtcgaaggccgcggctctctggtcggcgcgctcgtggtgtccgaagacgatcaggtcatggccatcatgaagtccggcaaggtgattcgttccaacgtggacgaggtcaagcgcaccgggcgcaacacccagggtgttaccttcgccaagcctgataagggcgacgaaatcctttccatcgcacgcaacgaagaaaaggatgaccccgaagaggaggtcgccgacaacggcactgccgaagcaggccagtcccccgccgaaccggtgaacgagtccaacgagaccgcacaatccggtgagaatgtgaacaacgtggacgaggcgtgagccgagtcccgaaaggctggtagcctcactaacagcagaggctaccagcaggctcttaaggagaaacgatgaacgatcagttcgacaataacgagtccgaggtgattcagcccaatatcgacaatacggtgaatgatgtggtgacacctgaacccgttcgggaggcaccgcgcaaggcccgttctgtttccagcgagccggaagaggttaccagcagcccgaagactgttcgtccggcagctcgtcgcagcactccacgcgcccgccgcatgagcctatccctgacccgtgtggatgcttggtccgtggccaaggtgacattcatgctttcgattgccggcgccattatccagattgtcgccgcagccgtcgtctggctgctgctcgatttggttggtgtattcagtcagattacccagattgtttcttccactggcttggatgctggcggtcttgatctgaagaatgtgctgtccctgaccaccgtggtgtctggtgtgaccatcttctccattatcgaagtggtgattttcaccattctggccaccattattgcgttgatttacaacgtggtcagctcgctggtcggtggcgtgcacgtcaccctcggcgatgactgagttttagctataccaacaaaactcccctcagtccgattcatggactgaggggagtttcgtatattcatagtcattagtgcttggccggcacaaaactttcgcgggcgaccagcttggtcgagagcatggtatggcaggtgatgtcatcattgaaactgatcgactgggaaagcatcagcagcgcgtttctggctaatgccgtctgatcgatggcatacgtggtcagcggcggtgaaatgtactgggcgatggactggttgttgatgctgatgatgctgacatcgcgcggcaccaaaatgccggccttggtaaaggcctgaatcacgcccacagccagggaatcagtggccacgataaagcagtcaggcatattgctgccgagcttggccacaatcgtttcgccgtgcttgcggccggtttccacgctgacctggccgccggtaaatatcagccctgcggtttccaggccaaggcgttcgcaccagtcgcggtatgccatcgtacggatgtcttcggggtactcgtaggtgcccatcatgcggccttcgccgccgataaatccgattctggtcatgccgcgggctctggcttcgctcaaggcgtccagtatggtttgcagcagatccggctgcacggagctgaaaagattcggggctgggttcacatcgatgaacacaccatgtggcagtacttcatgaagcctttccaggctctcgtaggagtgcggttcggggccgatggatacgaagccgtcatactgggtgctgttgtcaatgagtttgttgatatcggtgtagaacgacagggtgatatgcatctgctgcgctgtggcgatcaaggtgctgcgcagctcgctgtaataggcgttactcagctcctcatcactgggaatggcgtccagtacggcgatatcgtgcggagccaccagtcgcctttcctgtgtttcgtaaccgagttcttcacagacctgcagaatcttgcggcgggtctcttctttgacggagaacgtcggatcgccgttgagcaggcgtgacacggttgccggcgagaatccggcccgttgagcgatttctctgatagtgaccatgcgtatgcccgatatgttctttctgcaccgtttgcgtactatgtacttgttcctgcattactacccgtcattaggtaattggtaatgtatgtttacctgatacctatcgtagcgcacatcaatcggagtgcggcaaagatgtgcgccagttggcggaaaaacaacacaccgcccgaatgaatagcatcattcgggcggtgttgtgcggcaatgtctgcttgctgttgagccacattcggctaacggcattacctatgcgttacttggtttaccgggctgcggactccttgccgagcagcgcggccttggcgatgtccttgccgtacttggcggcatcggactcatcgtgcaggttggcttcgatcttggccacgatacgggcgtgagccttttcgtcgatcttcacgaagaaggcgaagatcagaaagccgatgatgatgaatgccagcggcatccagaaggcgaagccctcgaaggtggtgatgttggcctgggtcatgtcggcggcggtggtcttgttgacgccggcgaacagcgcgttggtggcaaagaccatgaagtaggtgctcagtgcgttgtataacagcgactggccgaagttaccgaatgcaaaggcggcaagacggcctttattaaactttttctggggttcggcagttgatgacgacatcagtgttttctcatttcccgtgatactgactgcggggcggacggcgttggctcttatttctgtcgttgaacaagataatgcgttacctatacaaagtaaaaccataactaaatgcattatctaatagtgatactaggaatgtccgcaatgtgattgtggtgacgattactgctccttggtatctagctcgtataggtctgcgtcagactgtgcggtgatgcaccatgcgatactgccgagcttgattttcatcgatatgcaggttatatttagtaaacattttatttactagttcagtcacggtgccgtgacgaattcgatgcaaggaaaggcgaaaaccattatgaccaacttgcagtcagctcagcagttctctcaggcctggcttaccgacccgcgtgtgtttgccgtcaaccggcttgccgcgcattccagccacaagttctatgatcacgctccccagtgcggcgaagccatggatctcaagcagagtctggacggtcaatggcgcgtgcagatggtggatctcgctgatttggcggacaacgagcttgctgaggcggcgtttgctcagccgggatacgacgctgccggcttctcccccatcgaagttccctccgcattggagaccaagggattcctgaatcatcagtatgtcaaccagcagtacccgtggtccggccatgagagcccagtggcaccggatgtgccgaagcataaccacgtggcgctgtaccgtcatgagttctctttggaacccaaggcagctgccgtgttggaggccaataagactgctgtggatgatgccgccaaacgtcgcgttacgttgacattccaaggcgcggccacggctattgccgtctggctcaatggcgctttcatcggctatgccgaggattcctttactcccagcgagttcgacgtgactgatgttctgcgtgacggcgtcaatacgttggccgtggcttgctttgaattctcgtccgccagctggctcgaagaccaggacttctggcgtctgcacggcatcttccgttccgtggagctggaagcccagccgttggttcatgtgaacgacctgcgcgtgctggccgattacgaccacaccactggcgaaggttcgttggacgtcaccgcactggtgcgcaatgctggcactgctgccgccgttgccgccacagtgctcgatgctgccggcaacactgtctggcacagcaagctgactgccggagctgatgccgagacgttgaccgtgaaggccaatgtcggcaaggtcaacccgtggagtgccgaagagcccacgctgtacaccctgcaggtggtggcaaccgatgccgccggtcaggtaatcgaagcagcgctgcagcgcatcggcttccgccacttcgccatcgaagacggcctgatgaagctcaacggcaagcgcattgtgttcaagggcgtcgaccgccacgaattcgatgcccgcaccggccgcacgattgccgaagcggacatgattgaggacatccactcgttcaagcgcctcaacatcaacgccgtgcgcacctcccactaccccaacgagacccgctggtacgagctgtgcgacgagtacggcatctatgtgctggacgaaacgaacctcgaaacccacggcagctggaccgatccgggcgatgtgttccagcccgcacgcgccatcccgggcagcaaggacgaatggcgcgccgcctgtgtggaccgcaccgcaagcatggtgcgccgcgactacaaccacccgagcgtggtgatctggtcgctgggcaacgaggcgttcggtggtgacgtgttctactcgatgcgcgacttcgtgcacgagaacgacccgttccgcccggtgcactacgagggcacgttcaatgaccccgaattcagcgccgccacagacatcatgagccgtatgtatgccaagcctgatgagattgtcaagctatacctcggcgaggacggcaagaagccgtacatttcctgcgaatacagccactcgatgggcaactccaccggcggcctgcacctgtacaccgaactggagcgctacccgctctaccagggcggcttcatctgggattacgtcgatcaggccttgtggcaggactgcggcgacggcaccgagcgcctggcctacggcggcgacttcgaagaccgtccgaacgattacgagttcagcggcgatggcgtcatgttcgccgatcgcaccccctcccccaaggctcaggaagtcaagcagctgtacgccaatgtgaagctcgtgccggacgagtccggtgtgaccatcactaacgacaacctgtttatttccactgcctctagtctgtttaccgcgcgagtgctggtggacggtgtggagcgttggcatgccaactaccgcttcgatgtgcctgccggcgagaccgtgcgtgagccgatcgccttcccgaaggtcaccgatttggtggcgctgtccggcagcgccgaagtgacctacgaagtcgacgagcgtctgtccgaggccactgactgggctccggccggctacgagctgaccttcggccagtatgtcgccgcggtttcgttcgatgatggtgccgcggatgccgttgttgccggtgatgccgaagtggcagccgatggcttcaacgccggtattcacaccgacttcggcgaagtgctgctctccaagacgcagggtggcatggtctccttcaagcgcgatggccgcgaaatggtgattcgccgcccgaacctgaccaccttccgtgcgctgaccgacaatgatcgcggtaacggttccggtttcgagcgcgcccagtggatggccgccggacgctatgcccgtgtgaccggtacgtcggtcgaagagactgccgatggcaagggattgaaggccgcctacagctatgaactggccgacgccaagcacacgccagtcaccgtgcactatgaagtcgacgccgcactgcgcgtgcacctgacggtcgagtacccgggcgaggcggatgccgccacgctgccggcatttggtctcgaatggatcctgcccaagcagtacgaccgcctgcgtttctacggtctgggaccggaggaaacctatgccgaccgtctgcacggcgccaagttgggcgtcttctcccgtaccgctgccgaggattgcgcgccgtacctgctgccgcaggaaaccggcaaccatgagcaggtgcgttgggtggaaatcaccgacgaatacggccacggcatgcgcgtgaccgcagccggcggcacccgattcgccaccagcctgctgccgtacagctcgctgatgcttgaggatgctctgcaccagaatgagctgccgaagccgcgccacaccttcctgcgtctgctggccgcccagatgggcgtcggtggcgacgacacgtggggtgctccggttcacgacgagttccaggtgccggccgaccagccgctcaagctggatgtgacactcgaactcatctgagttgccgcggcgctcctgttgaggagttgccgttgtagacctgtagaccactgagggcggttatcgggattccggtaaccgccctcagcgtcaataatttaggaaataagcggcttcgtcctaaaatcttgtcactgactctgtctcagtgacagaaatttaggggcatggggctgatttcctgaaatcctgtcactgagttgccgcgaacaacaaaaatttaggacgagtgggctattttcctaaatttctgacgctgtcggaaaaaacaattggccatctgcgggaggctcatagttgggcacgtgtcgctgccggggagttgatcggtcatccatggagtctcatggccgcggtggtgactcgcattgcgattttctccaccttcagaatgatgtcgtgtttactggcggcttcgtatgatgacgaacgatgcttacgtatttgggttatttttcgacgtcgttcactattgcaatcgtaatgtggccgattctttcggccgtacttactttgccgattctggctgggctgtaccatcgccaccatcgtatgaagttgttgtctgcgggagccgcatatctgacggtactgtatgtgctcggtttgattacattcacactgtatccgatgccggatgacccggaatcgttctgcgcggcgaatgccggccagttcgcaccacaacttgacccgctgcgtttcatctcagacatccaaaacggcggattgagcggcatactgcagctggtaatgaacgtggtgctgttcatgccgcttggtttcgtgctcactcggtggctgcgctggcgttggtgggcggtgctgattggcggattcgccgtatcgttgttcatcgaaagctcgcagctcagcggtttctggggcctctacccgtgcgcctaccgtcagttcgacgttaacgatctgatgaccaatacgttgggtgcgatgacgggcctcgccgtggccgtgttgttcggcaagtgggtgccgatggcccacatgcccgaacgcagcgagtataatgaacaccctggcgcggtgcatcgtctggtgacgttcatcatcgatatggtttttgtggccttggtatacgtcccgctcaccttgttggtgacgttcttgttctactgggcggctgagcctttgcagaacggtgatttcatgctgttcggtggacatctgaccgttggcgttggttggctgaacttccttgcgccaataggagccagtctggcgttcctcattttcgagttcctgattccgctggggcataagggccgcacgcttggcggcatgtatacgcacatgaccattgaaaccaagccgcgcaagggaatcgcgcgcgccgtgttctacattctgcgcacgctgattatgggcgcaatggtggttatgttcattatcggattcggacacaacgcgcatatcatgcactacaccttctacggcttcgtcatcctgttcctcttcgcggtgttcgcccatcgcatgccttgggactttgtgcccggatcttcggtggcgccggccccggctgtgcccgtgtatggagcggcggatgtcgctgcggcaccggctgagtcatctgccgcgaatgcacattcggacaaagagggtgcggcaaccgtggcgggtgatgatgctgtacctggcgcgcccgattcggatgctgcgtcgaagggtgcggtgaatacgaagaatacgggtgatgcgcgtgccgaaggcgatgaatccgccgccacaaatccgaatactgtgggacaagatgaaaaataggccgatttttggctgttgtcccattcccatagttgtggcctgatatggcataaccgtaggaatggcggtattccaacgattctgatttcttgtgttgggacaatcgaacagtcaatcgattgatgctgatgttgtcccacagtctcgtgggacaacatcgcaaaaacagcgattatcgtatgttgtcccacgctgaatagcgtcggcccctgcccttcatgagtggaaggacgggggccgattggtttattcgcgattgcgatcgcggcagtctgtcagaggatcacagcacgccctgggcgaccatggcgttggccaccttgatgaagcctgcgatgttggcgccagccatcaggtcgccttcctcgccgtattccttggaggcagccagggagttggcgacgatggactccatgatggactttagcttggcgtcgacctcctcgaaggtccagctcaggcggtagctgttctggctcatctccaggccggagacggccacgccaccggcgttggcagccttggccgggccgtacagcaggccggcgttcttgtagacctcaatggcctccggagtggacggcatgttggcgccttcgcacaccaccttgcagccgttggcaacaagagccttggcggactcctcgttgatctcgttctgggtggcgcacggcaaggcgatgtcgcacttgacggtccacacgccggagcaaccctcgtggtactcagcggacggcacacgctcggcgtactccttgatacgaccgcgctcgacttccttgatttgcttgaccacagcaacgtcgatgccgttcggatcgtagacgtagccattggaatcggacacggtcacgaccttggcgcccagctcctcggccttctgcgcggcgtatatagccacgttgccggagccggagatcacgacggtcttgcccttgaaggaatcgttcttcagcacgcgcagggcttcggcggtgtagtagcagacgccgtagccggtggcctcagtacgggccagggagccgccgaattccagacctttaccggtcaggacgccggagtactcgtcgcggatgcgcttgtactggccgaacaggtagccgatttcgcggccgcccacgttgatgtcgccggcgggaacgtcggtgaactggccgatgtgacggcacagctcggtcatgaaggcctggcagaagcgcatgacctcggcgtcggacctacccttcgggttgaagtcggagccgcccttgccgccgcccatcggcagcgtggtcagggagttcttcaggatttgctcaaagccgaggaacttgatgacgccctcgttcacggtcggatggaagcgcagaccgcccttgtatggaccaatggcggagttgaactgcacacggtagccacggttgacctgcaccttgccttcgtcgtcaacccaggccacgcggaacttgaccacgcgctcaggctcgacgaggcgctccagaacgccgttcttttcgtattcggggtgcttggcaatgaccggctgcagggtgtcgagcacctcgtagacggcctgcaggaactccggctggtcaccatcgcgagcaacgacctggtcgtacacgcgcttcacgtactcatcagtgagcataattctccctagaggttgggttatcaaataaggcgattatattgtatgtacggtgtcaaggggtgacaagaaattgctcaggatgtggcgtggagcggatgtggcctacgccaccaactccgatgcatcggcgcgagcgatggcctgctcgtagtctttggtgcccttgaagacttccttggtccacgggttgatgccctgcttcttggcgcgcagcaggatgtagccgagtgccaacacgttggccactagcgcgattagggacaccgcaaggttcacgttcgggttgttcacggactgggtggagaacacggagtagtcctggaacatcgggaatacctgcgcgaacatgcaccagatggccaatgtattggcgcgattctggatccagccgcccttgttccagaagaagttggccacggtgggcgccagcagcagtgcaaggccgcagtaccaggagtgggtgggcaggcaattgtaggtgtagcagaagttccacagatcgtaggccacgatgaacacccaggtcatgtccggccagagcatgtcgtccttcttcttggaggcgtagatgccgaaccagccggtcatgcagaagatattgaggatgccggccaagccgttgaacacgttgtgccagccaccgtagagggtcacgccttcagtggagatccaggtggtgccccagccgcggatggcggattcgaagtcagagaccacggcgatgaggatgttgatggccacgatcacgaacgggaagcacttgaaccagtgggatttgccgatagagccccacttgtatttgagggccataaagccgatgcagccgatggtggccgcgtagagcttggcgtagtggaaccagctggtcatgtgcgcgtaggtcgggttgttgagtgcccagtcggcgcccattgcggcggcggtgtagatggtgatgaagtagacggtcagcacagccgggacgacgaggaaggcgacgatgccgccggttttggtgcgacgagccagttcgttggcgccgataaggcagcagaagacgagtatccagccgatccattggcagacggcgttgccgccatagacctgaaacagcatgagcggtcctttctgatatgtggtgcgctccgtgattctccatcggattccgagcgccgacgccgcttattgacgcagcgtcaagttctctcacggcatagtgtatccctatgttgacatggtgtcaatatgggttctgtgcatgcggtttcgcatcattacaaggttgacaggccgctgaaatttgtctgtgatgcactagaatcggattggatgttgagaagctagttgcgaaaagataaaaacccttggaatcggcatgattccaagggttatctgtggagctagccgggttcgaaccggcgaccctctgcttgcaaagcagatgcgctaccagctgcgctatagccccagtgaaaaaaagagcggcacgtgggccgcttcacttttttctgtgggcccgggaggacttgaacctccgacctcatccttatcagggatgcgctctaaccagctgagctacgggcccgattcatacgctctaaaagcgcacaagtagctataataccgattccctttgacttgtcaatgcgtaagagacggcgtgtcgcgggtggtgccttgctgggggagtgcggttgtgtcgtgctgcggacggacaatatgcggcatgaagattgatgggctggaagtgcaggtggtgcgtaaacccatcaagaatatgtacctgcgcatcaagccgccgaatggtgtggtcatgatttccgcgccgcggcggatggccgagcagaccattattgattttgtccgggatcggaggccttggattgataatcaccggcgtcgtatggcacttgcccgagagcgttcggtgattggcagcttgggtgattcctggcagcgtggcgccggccatgggggagtgggccttgcttcgggcgggttcgatggtgtaaacaacggcagtagtgtggccaccgataatgcggcattgacgtggactaaagagttgcgtgaacgtgcgtcggccaatatcaacgcacagttgcctgcgttgctggccaaatgggggccgattgttggccgtactcctacgcatatcacgttgcgggtgatgacttctcgttgggggtcatgcacgcctcgtaccggccgagttcgcctgaaccttcagttgggccttatggagccgcaattcctggaatatgtgctggtgcacgaaatgacccatttgtgggaaagcggtcacggtaccggattccagcggcgcatgactacgtatctgccgaattggaaggcgttgcgccgcgatctcaatcgtcgtgtggtgctgtagagggttattcggaatgaggtagttgtggttcctgccataactgcatggcaacgctggcccgtagtgtgacggtggttgtctgcttccttttattccggatagtcgccgtcgccactcctggtagtccttgggggtggaaggatgccggccccttgccggttcctgacgatggatcatggtcgacacccgagtgtcgtttccttgtcagtttcggacgtttgcgggtcggcctgcctttcggtggggccggggcgacgtgcttgtgtccgagatatcggcatcctttcccggcgatgttgacagccgaaccgtagtcacgtgggatggtccgcccgcagccggggcactggtattccctggctttgccgaggttcttgtggagcggacctgcaggccatcgtcgacgagatcaacgacacccccatgaaggccctgggccgggaaacgcccaacgaggcttggtatcgcgaactcggcaaggtaatgtcgaggacaagccacccaaggacgagcgttgcacttacaaattgaatctggatgtcgttcctcttccgacaggtgcgaatacccttggcccaaggtgcaacaccccttcgtttggttatctggacaatctccaatctaacgggtgttgcactttcaattagacaacgggacctgatgatctaccaacaagtgcggcgcatcgatgaactcgaacggcgcatcagcgaacttcagctggagctgaagcagcgcgaaggccagcaagggtgagctgatcggtccaaccgagctactcagccaaccaatccagccagtccgatcagaccgacctaactgatcagaacgggccttctgaccagtccgaaccatctgaccggcctgtacttgttgactaagtgtgcggcccgtcattcgttatggaacatgccggccatgtatacaggcaggtaggttacattcccttcgactgagacgttgcacgggccaagcacatagcctgtattgagatggtattcagggtgggcgagcacgttgtccattgcgcgatggcgtttgtaggatttgccggacttcacctcaatcggcaacacgtgatcgttgcggtcttggatgaggaaatcgagctcgccaagcttcttactgttgtagtagtacaggtcaaatccgtgagcgcgtagctcttgggccaccgcattttcatagattgaaccgtagttgatatcagggttgccgtcgagtacgtcgagcgcggttttcttgagaaacgagccggtaagcagacccacgtcgttgtaaaagagtttgaagaggttacgttccttgctcatctccaacggtgtgcacggttcgtccacgttgtacgcggcgacggctacatccgcattgaccagccaatcgaaatcggaagcaaccgattggaatctcatgttcttttcgattttggcgaaggtgaagcgcttgtttgggttatttaactcgctgggcaccaaatcgtagatagcgcggatatgcagccggtcttctttgcgcgcgtattggctgatatcgcggcgatattcacgctttatgttctcttgtatagtgcgcacgtccgcaacgctgccgtttgccacgaacgagtcgaccgcggcaggcatgccgccgatgaccagatatttggagtacagctccatgagctgttgatggatgaactcatccacttcctggtgcttggcaaagcattcggcaagcatgttgaatacgtcgttgccgatatgctgcgaccagcagaactcttggaaatccagtggatacatatccagctcggtcaggtacccgaccggtaccgagcgtatatcttcgagctcgactccaagtggcgagccggaaagcgcgtaatcgaaccgaccatcatctacaaggaacttaattgcggtgaccatttccttgcaacgctggacctcgtcaaagaaaatcagggttttgccgggtactaatggcgtatttacggccagttccagcctcatcagtaggtttttggcatcgcggggccggtcgaataatgcaacgaggccggggttctcgatgaaattgagctcggcgatatggtcgtaatgctgttgggcaaagtgcctgatgatataggttttgccaatctgacgggctccggtgaccagcagtgcagtgcgtttcggcgcggatctccaagcttccagctgtgtctcgatttttcttcgcagcatgagaatctccagtcatttgtaggccttgcatctatgctgggcacgttttccaactgtttatagagcatattttacacttttccaaccataagaatgcggttttggctacgttttccaacctcaaaatggggagttttatacacttttccaacttatgtatgtggagactctctatttcacgtgagacgaaagtggctcccctctttgaggggagccacggaatactgcttttacttatgccaggtgagagcgcatgaaccactggaacttttcgagttcctgcacgtgatcctgaataacgttggagctgatgacgtccagctcatccagctcagcgatggccttgcggtcgtcggcgatgaaggcgtcgtagtactcgatcagcgccttgaggtactcctcggtgcctacgcggccctcggcgtcgaacgacttccacgtgcggttgcgcacgatggcgtccgcgcggccgtccggggtgccgcccagcgtagcgatgcgctcggcggtttcgtcagcctgggccagcaaggcctcgacctcggggtcaagcatctcgtgaacggcgatgaagttcgggccggtcacattccagtgagcgtgcttcaggaccagagcagcctcctgctcctggctcagtcggttctgcagaatcgcgatggccttctcgctggtcgcctcatcgagtcccggcacaacaaatgcaagtgtcataatgttccttctttctatcggtggaacgttgctcttcaattctacgatctgcggttctgccccgggccgaacaaataggtggtgaatatcacgtgactattaggaccaattgcaaaaaactctcactggcagcggctcagtgagagtttttgcaaaacgcggttagttggcgtcgtcggtttggggttcctccggcagtggcgcatggtccggggcaccggctttgcggacttcgatggtttcgatgcggcggccatccaccttggtgatgaccatgttgtagccgtcgtcggaatgcagcacgtcgcccatcgcacccatcttgccggtcttggacaggaagtatccggcgaccgtctcatacgggccgtcctccagctcgatgccggtcagatcggcgaagtcctcaatggtcatgctggcttcgatcgtggccacgccattgacgaacgcggtgcgggtggtgcgttcgccgcccttctcgctgggcagatcgtactcatcgcgaatatcgcccacaagctcctcagtcatatcctcaagcgtcacgatgccgtccgtgccgccgtactcgtcgatgaccacggccagatggatgccgcgcttacgcagcagttccaggctcggcagcagcttggaggtgccgggcagggagatgccttcgcgcaccacatcgcgcacgatcttggcgttcggatcgcgcacgtccagcagatcgcgcacatgcacgaagccgatcacgtcgtcgaaatccttgccggtcaccgggtaacgggagtacggctggtcgcgtacgaacgcggcggcctcggccaggggctggtcgccctcgatgaagaccacgtcggcacgcgggcgcatcacctcggcgacgatggtttcggacgcatcgaacacatcgtccagaatcgtgcgttcgtccttggagaggttggtgttggagctgaccagcacgcgcagctcgtcgtcggacacctcggactcggtctgctgcgggtcgaagccgagcaggcggacgatgccgttcgtgttcttgccgatgagccagatgatcgggcggcagattgtggcgaacgcgtcgatggcgggtaccacggcgcgcgcgatctgctcggtgcgctgcatggcgatgcgcttgggcaccatctcggagatcacgatggagcagtaggagataatcagcgtgagcacgatgttcaccaagccaccggcgatgccggtcggcacaccccaaccttccaccataggaatcagatacggggctatggaggaggcgccgaacgaggcggacaggaagccggagagcgtcacaccgatctgcacggtggagaggaaagtgttcgggtcacgtgcgattttggcgactttggcgccgcgagcgtcctcctgctccatttgctcgatctgcgagccgcgcagagagaccaatgccaactcggtgccggagaacacggaaccgataacgagaaatacaaaaatcaggaggatgttcaaaccaagtgacatggcttcaactctaggggagtggcacgtcaaattggggtgtgttggctgggcagggtttgctagctgcgttggctatgtgaggcgtgctgtgtgatggcgtgtgtggcagtgtgaaagagtacgcaatagtacgcaatagtgtcatatggtgtaatttcgtgtaatttggtacgcattcgtgtaatatagtacgcaatcgtggcagatggtacgtgttgtgggcaggagtatggtcatggcaagcaatcccttcaaaccaaccgccggtaaaatgccgccgattcttattggtcggcactccatcatcgaggatttttccgaagcgttgaccaacggagtaggggctcctgggcgcattatgctggtcaccgggcagcgtggctttggaaagacggtgatgctcaccgaatttcggcgtatcgccaaagcgcagcattgggaagtcattggagagacggcgtccgcggggcttgtcacgagactcatagcggcattatcgccttcgggattgcgcctggatcaggccaacatcagtccttccattggaatttccggcattgccacggcgagtctcgggcaagcgcacttttctgcggaattcaatccgctgacgttgcgcaacgcgttgaataaacagttgggcagtaagaagctcggtaaggggaagggcattctcatcaccatcgatgagacgcaagcggcctcacacgatgatttggtggctattgctacagccgtgcagcacgtcattacggatgccgatgaaagtgatacgcctgatgccgacaagaaaggcgttgccatcgtatttgccggcttgccgtatatggtcaacgatttgctggataacgaggtgaccacatttttgcgccgcgcgttgcgccgtgagctagataatgtgccgcttccagacgtcaagaatgcgttcttggagacggttgcggattccggtaagaccatcagcgaggaggacgcgctggaggccgctcgccagtccggcggatatccgtatatggtgcagctcgtcggctattacatgtggcaatccgcgcagcgtcgaggctcgaatgtcattactgctgatgatgtgacaaccggtgtttccgatgcgttgctcgccttcgacgatgccgtatgcgctccggcgttggacggtaccaccagcgcagaacggttgttccttacggcgatggccgaagattcgccgaatcccacgcaggttggcgatattgtggatcgcacgcgcagaagccgcagctgggtgagcaagtaccgggcgattctcatcaaggataagctcattcgaccagctgggcatgggcggctggagtttgcggtgccgcatttggggcaatatttgcagtcactatagaactgcaaacaaagctcagaagctcagcacttccactttgccggagtcgagctggtagcgggtgccgacaatcatgagcttgtcgtcggcgagagcctgctggataacgggggactgctccaccagagtctcaatggtatgggccacgtgcacgcgctcaatatcctcgtgctccttaagctccgcctcgcgcgcctgccatacggacatgcctgcctgacgcagaataattgattcggcatcggcaatgtgctcatcgagatcatccatggcgtcggcggcttccaacgaaccatctgcctcggaggtgatggtgcgcatcaggtcgtcaagttcctgcgcggcggcttcgagcgcgccgcaatgctcatggccgagcacgcagatcaggctgacgtgcagtttcttgaccgcgtattccaacgaagcgatgacggcactatcgatgagctggccggcggtgcgtacggtgaacaggtcacccaagccctcatcgaagatgatttccggaggtacgcgcgaatccgagcaggcaagcacagcggcgtcggggttctggccgtcaagcaacgtctggcgggtttccttgtcttgccatggatggtccggcttgccttcggcgaatcggcgattgccttggagcatacggctccacgtcgcatttgcggtcgattcctgttcaacgtctgcctgagccatgaaaacctccattatcagcggactgctggtacccatagtagcgattggaagtgcggattcgcggctgcatgcataatctggctttgcccaaagcataatgagaacgctcacaatctcaatcctgtttaagggtgggccgtgatgatagtcagcacaagggctgtggctggtgtgataaggctcatatgttctgtccgtgcgagccctgtgccgccacactacgatgggttctggtaatcgcctgaagaatcctgaaaggaccgaaaatgactcttctgcagcatgaattgaccgatttcaaggtgaacgcattccagaacaacgagttccacgaggtgaccaaggacgatgtgctcggccactggtccctgttcttcttctacccggctgacttcacgttcgtgtgccccaccgagcttgaggacttggccgagaactacgccaagttcaaggaaatcggctgcgaggtctactccgtctcctgcgacacccacttcgtgcacaaggcctggcatgacgccaacgagaagatcgccaagattgaatacccgatgctggccgacccgaccgccctattggccaaagatctcgacacctacaacgaagttgatggcatggccgaacgcggtgacttcatcgtgagccctgagggcaaggttgtggcttacgaggtcatctcctccaacgtgggtcgtaacgccgaagagctgctgcgccgcgtgcaggcctcccagtttgtctacgagcacggcgaccaggtttgccctgccaactggaccccgggcgaggaaaccattgagcccagcctcgacctcgtcggccagctgtgacggtttgaactaaggcatgttgtttgcccccgctggcgggggctgtcggcaacgccgactggaggtggtcgcggcaataggtgaaccacccccacccgcttcgcgggagcccccgccagcgggggcctgtgtatatgcaaggagtttcaatcatgactcagaccaataatctttatgacgtcgtagtcattggtggcggacctgcaggccttaccgcgggtctgtacttggcccgcgcttgctaccgtgtgctgattctcgaaaaagacgatttcggcgggcagatcaccatcaccaacgaggtcgtcaactatccgggagttggccgcaccacgggtcgtgcgctcacccagaccatgcgtcagcaggcacaggactttggtgctgaattcctttccgccgaggccaccggccttgacgtggacggcgacatcaaaaccgtgcacactttgcgtggcgacatcaagaccttcggcatcctcatcgccaccggcgccagcccgcgcaagctgggcttcgagggcgaggccgaatacgcaggccgtggcgtggcttactgcgccacctgcgacggcgagttcttcgccggcaaggaggtgctggtggttggcggcggattcgctgcggccgaggaatccgtgttcctgactaagtacgcctccaaagtcactgttctcgtgcgtgaaccggacttcacttgtgacgccgcagtggccgccgaggccaaaaacaacccgaagatcgacgtgcgctatcaggtcgaactgaagggtgtcactgccggtcagggcggcctgcgtgaggcttcgattcttgatttggctaccggtcagaccgaaacttggaagcccgccgattcgggcacgtttggtgtcttcgtgtttgctggctatgtgcctgccactgatttggtgtgcggcgtggtggagctcgatgatcacggttacgtggtcacgcatgactatcttgaaacctcggtgccaggcgtgtatgcggctggcgatttgcgcgtcaagaacctgcgccaggtggtcaccgccaccgccgatggtgcgattgctgccgtggagctggagcgttacgccaagcagatgagcgagaaaaccggcatggtgccgcctcgccccaccgtctccgcttacgaggagtccgaagcgaaggccgcctccgccgcctcggccgccggcacgacgcccgctccggcacccgccaagcgcagtgccgatgccgcagccgcagccagtgccgccaagaagcccggcgagctgttctctgccgccatcaagcagcagcttgatgtggtattcgggcgcatgactcgcccggtcacgattgcccttgagctggatgacactccactttcggcggaattgcaaggctttatcggcgaaatggtcgccttgtctggtggcaagttgaactcggttgccgtcgatgccgcagggctgattactgcggtggacggttcgagtgcgcctacgtcgttggtagtcggcgagccgctgaccgtcactctgccgagtggcactgaactgcctacttatggttcgttagacgattccggccgcgccacattcgacgttgccggtgtcctgccactcgcccgcccggccgtgcgcatctgcgtgccagccgagggcgacgaggccggcaaggacggcgatggttcgctggtcttcaccggtctggccttccacggcgtaccttccggccatgagttcaactcctttgtgctcggcctgtacaacgcggccggaccaggccagccgctgggagacgatctgatcgaacgtgcgaagtccatcacggacccgctgaacatcatgattctcgtctcgctcacctgcacgatgtgcccggaaaccgtgctcgcctcccagcgtattgcctctctgagtccggccgtgcgcgccgaagcctatgacgtctcgcacttccccgaactcaaagaccagtacggcgcaatgagcgtgccctgcatcgtcatcactcacgccgacggcacccagcaagtcgaattcggcaaaaagagcatcccccaaatgctcgaactggtcggcgcgtaagccgcacggcctcagccgtattcaacagcaacaacaacgattctgccaaaaccatgacgtgcatcgattgatgcgcccgattccggcagaatcgttgttccgtcatgtcttcatttcccgatttgacatgttttcgtttctgactttgacatgattttgattcttagaaaacgtccgcagccccctaccggtgatttgtttgttaacggattacactggagtaccgtaaggcaggaacaatggagggtttgtgggcagaactacgccataaccccgtttagaggagtattcactggggcggcagcatggaagtgcttttgatcggtaataccgattacattaccgaacagtggattcagcatgcctttccccgagaccatgtggtgatagcggaacgagaaggcaccgtagacggcaatgaccgtctcagaatcgtcaacatgtctgacgccaacacccttgccgaaacccttaccacatacgaatttgatcgcatcgtattcttttccgaaaatctgaccccacgcagcgaccggtacggcgatctgggagcattgcgaagatttctgcatgccattcgcaacaggcaaacgcaaatgctgatggtcagcggccccgaatccgaatttacctatccggaaaacgccgacgtacgtgataccagcaaaagcctgatatctcgagcgtcggaagaactctgcctgtactacgcacgcacctaccgtctggaagcgaagatcattcgctgcccatacttgtatgcacccgaacgcaatggggcaaccgcatatttcggcaggctgttcgaacaggcgtcagcagggtcgatctcattccgtgaacgcgaacagcagcagacatgctttctctgcgccgacgatcttgccgaactgatctaccgcatgttcgacgattggaccgccgaaagcgaagtattccacgtgcccaacgtgttcaactttacatacggtgatttggctgatgtgatcagcgcggcatttcccggattgtcggtgacttttggcgaagacaggccccaaagttacccagtagacgaccatgcgctgcgcttgcgttatggctggtcgccgcgatattcgctcaaacaggatcttcccctggtgctgcaacgctggaaagaggctcgtgcgcaggaacagtccgaaaagcacccgatctgggattttctgcgtaaccattcgaaaccatggatcgcattcgaaatctgcgtcacgttcatactggaggaactgcttcgcaccgcggtacaaggcgacagtcagctgggaaccgtggatttgcgcctatttttcgtggtgatcgtcggcacgatgtacggaatgaacgcaggcgtgttcgcggccgcgctcgcatgtgccggcatggcgttgtcgtacgcgtcgaacggcgcgtcattcgctccgttgttttacgacacgtcgaactggcttgcgttcgtagtgtatttcgttgccggcgcagtatgcggatacgtgcagatgcgcaatcgcgaaaacctgcgattcatgcgtgccgaaaacagtttgctgcgtgaacgacttgcgttcctgcgtgacctgtacgacgatgtgcttgatgatcgtcgtatgctgcgcggacagattatcggcaggcgcgacagtctcggcaaaatgtatgcgatgacccgtgaattggacgaagtgctgcctcgaaagctgtatcacgcgaccattcgcattatgcaagatacgttgggcggcgatagtttcggtatttaccgaatcgataatggtggtcgtttcgcgcatttagtggccgcgagtccgcagaccgaatccttattcagtaaatcggtgctgcttgagaattatgccaacattgtcacggccttggatcatggcggattgtgggtaaaccgcaatcttgaacaaaaccttccaatgtatgcggcgggcgtgcgtgccgatggcaagctggccgtggtgattgtgcttgccaaagcgcagcccgaccaaatgaacctgtacttccagaacctgttcaccatcatatgcggcttggtggaatccgcgatggtgcgtgccttcgattatgagaatgttgcgtggcagacgatgctggtgcccggcacggaattcttgaacactcaggtgttcctgtccaaagtgctggctgcaaacgagctcaagcacgctcatatgagcaatcatctgctgttgcgtgtggaagacgcctggcaagacgatggtagccgcctgatgggagccattcgtcaaacggatgaggccggtgtactgcaggacggcaatgtgtatgtgctcatggatcaggccagcgagcatgagctgccgatcatcaacggtcgtttggcccaggctggattgcatgtgaagctagtttcaggccacgaggaagattcgttgctggctgaggcttcggaacaagtagctgccgagtcgcaagcggatgaaacgccgcgcagtgacgctgcgccgaatgactccgcatcgcatgaaggtggcgcagcatgaatgcgacggtgatggcgatgctgcttatcgccgtgcatgtaatgatatgcgtgctgctgtgcgtattgtctcgcgttggcgtgcttcgtgtggaggggcgactgcttcctttcatgctgctggtgccattgtgggggccgttatgcgtgctgttgctgcatgcgagcacgctgattcgcgttggcgcgcacacggctccggggcttgagcaaatgcgtgtggatgatgaggaacgtcgaagcgttctcgttgaggaacgagccgatttcgccaatacagtgccgttggaagaggcgttgatcgtcaatgattcgagtcagcggcgcagtctggtgatgtccattctcaacgataatcccagccgttatatcgatgtgctgtcgcaggcccgactgaatgaggatgtggaagtcgtgcattacgcggctaccgccatggcgcagatcagtgccaaggaagatcttgcattgcagcgctgccgtaacgattatctgcagcatcgaaattccgaaacgatgttggaacgctattgcgatgcgctggaacgatatgtcaattccggtattgcgcaaggatatgcattgcagttgcagaagcagcgatatgccgaagtattgcaggaacgacttcgtaaacatgacgattattacgttgcgtgccgtcttgcgcaaatgcagattgatcttgaactctttgatgatgccgcgcacaccgttgacggcgctatggaacggtggccggatcaaggcgatgtatggctgatgcgtctacgactcgatgccgcacgcaatgatggcgatgcgttgcgtcaaaccgttcagcagattgaaagcaagcacatttatctcggtggccaaggaagacgcacgctgcggttctggactggagccaaggaggctgaacgcgcatgatcagaggattcctgtcagacgtgttggccaagtggaagcgattccgctggcaaggtctggtcaaggtctgggctgtgttcatggccatcgcattggtgttgctggtggaaagcctgggcgtgcattatggtgccacgcggttcgacatcacgtatttggatcgagacaaagccattcctgcagccaacgccattgctggcgaaaaagccacgaatcttttggtgatcgacagttcgcaggagggtgtttccgatgctgaaagcatgcttgaccgtgtgtttcttgacatgaaagtgcccactgtcaccgtcgatcttgcgcaagatggcgagattcctgcgttgaagcagtatcagacgatggtgattgccatgcccaatttggattcgttgggcgagcatgtgctgcagatcatgcaatgggtcaaaaagggcggcggcgtcatgttcgccatgaccccggagaaaaccggctatttggatgtgatcggtccgcagatcggcattgaatcgtccacatacgaatatgtggcgactgagggcattacaccgtccgaggattttatgttgggggggggtcagacatacacgttcagtgacccgttcaaatcgtcgctgagcgtcgcgttgaatgatcgtgcacaggtggaggcggtcagcagcaatggcagaacgccattggtgtggaggaacgcggtggagtcaggaacggctgtgatgtgcaatatcggcatttacggcaaggtgtttcgaggattttacgcttcggcgttcagtctgctcggttctgccacggcctatccggtgatcaacagtgcggctttctacttggacgattttccgtctccggtaccgtctggcaatggcaaatacatcaaacgtgactacaacatgagcatttccgaattctattctcaagtatggtggccagatttggtgcgtcttgctgaacggtacggtattcgtttcaccggtgtgatgattgagaattacggcgatgacaccaaggatgatccggtacgacagacggacaacacacaattcgagtattacggaggattgctgcttcggcaaaacggcgaaatcggatatcacgggtacaaccatcagccgttggtgttgccgaatacacattacggcaaggaatacgcgtacgtgcaatggccgaatcgcaaagccattgtggcatcattgcaggaactgatcgcattccagaaagacgtattgccggccgcaacatcgtcggtatacgtgccgccgtcgaatatcctctcccaagaggcgcgaaagatcataggcgaggatgtgccgcagattcgcgccatcgccagtacgtatatgccttccgacagttccttgccgtacatacaggagttcggtgttgcggccgatggcgtggtggaggctccacgtatcgtgtccggcggcatggtgggcgacatgtacatgcgtcttgccgcagtttccgaattgaacatgcactatgtgagcacgcacttcatgcatcccgacgatctgcttgatgaagatcgtggtgcgaaagaaggttgggaaacctatcgcaagggactggaagattatttggattggttggaacagtcggctccgtccattcgtatgcagactggaacggaatgcgctgcggcggtgcaacgattctcaggattgacggtttcgatggaaacaaccgataccagttgggatctgaaacttggcaacctcaccgatcaagggtggctgatgttccgtgccagtaatggtacgcccggcaatgtgcgcggcggaagcctcaccaagctgaccggcaacttgtatctgctcaaagccacgagcgccacggttcatatcgaacgcaagactgggggagcggcatgagaatctgcctggttttggaaggatgctacccgtacgtgcatggtggcgtgtccacatggatgcacagctatatcgaagcgatgaaagagcacgagttcgtattgtgggtgatcggtgccaaagccgaagaccgcggcaaattcgtatatgacttgcctagcaatgtggtggaagtgcatgaggtgtttctcgacgacgccttgcgtctgagcggtgaacgcgcgcaagtgtcgttcaccgaagaggaattgcggtcattgcgcgaactggtgaatcttggcagcccggactgggatgtgctgttcaacctgttccacaccaaaggtgtgtatccgctgtcgttcctgcaaagccgtgaattcatcgaccggttcacgcaaatctgcatggaggaatatccgtatgtggcttatgcggatgctttccatactgtgcgctccatgttgctgccggtgttgtacttgatgggcagcgaagtgccgaaagcgcaaatctaccatgcgatttccaccggatatggcggattgttggcctgtttgggcggttccatcaaccatgcgccggtattgcttacggaacatggcatctacacgcgcgaacgtgaagaggagattatttccgccgaatgggtgctaccggctttccgtccgcgttggattcgtttcttctacatgctttcggaacagatctaccagcgtgcatggcgtatcactagtttgttcggtcgtgcccgtcttatccaaatcggtatgggtgctcctgccgatgcctgccaggttattcccaacggcattcaatacgaacgtttttgcgatattccactgaaacccgacgatggttgggtcgatatcggtgcggtggtgcgcatggcgccgatcaaagacgtgaaaaccctgattcatgcgtttcatgagctttcatctcgcgttgacaatgtgcgtttgcatattctcggcggtgttgacgatcaggagtatgccgacgaatgctatgagcttgtggaacagttgggtgtgcgcaatcttgagttcacaggacgtgtgaacgtggtcgaatacatgcgcaagcttgatttcaccgtgttgaccagcatttccgaaggccaaccattgtcggtgttggaatcgttcgcagccgcacgcccgtgcgtgaccactgatgtcggctgctgccgtgagcttttggaaggcgaggatggcgatgatttcggcactgccggtttttatgtgcctcccatgtaccgcgaaggcttaagcggggcgatggaacgcatgtgttccagccgtacgttgcgtgaaaccatggggcagatcggccgcaatcgtgtgaacgcctattaccgtcatgagcgcatgcttgacgattatcgcaagctgtatgccgataccgcggatcagttcggattggaacgctgatatggccggtattggatttgaactgaagaaactgttccatcgtaggggcttgatggcgatgctgcgagcctacggctatgccggcgtgatttgcgccggcccgatgctgctgggcgtgcttctgcagtttggcgtgctgatcgtgagcagttggtggcaggtgggccgccccgaccgcgatctgcttgtatgcatgatcacatacacattgcttgcctcgttggtgttgacaagttttctgtcgatgccggtcacacgttttttggcggatatgctgtttgatcacgatgagaagatgattctgccgtcgttttgggggtctaccggcatcatgttggtagtgggcgcggtgttgtacacggtgtttctgctgttttctggagccacgctgatgcagggcgcgttgtgtttatggctgtttcttgaaatggtcgtcaactggaatgcgatgagttatttgacggccattaaagattacagaagcattctgtattcttttgttgcggcggtgctggtggcgttcgtcacgtcatgcgtgttgcttgtgttggcatgctctcctgtggagtcgctgttgttcgcagtggtgcttggctatggtgtgatgctggtatgggatgtgctgctgttgcatcggtattttccgcaaagtcgtgagaatccgtggctgtttctgcagtgggttgaccagtttctgccgttggcgttgaccggattgtttaccaccattggcttgttcgcccatttggtgatcacctggtgtgggccgcttggcatcaaagtgaagggtctgttttatggtgcgccatattacgatgtgcccgccatgcttgcgtttttaacgattctgatcaccacggtgaattttgtggtgtcggtggaagtgaatttctatccgacatatcgttcgtattacagtctgctcaacgatggtggcacggttaaagacattaccgttgccgaaaatgaaatgctggctgtgctcaatcgagaattgcattacacggcgttgaagcaattgttggtgaccgctgccgtgatttcgttggaaaaaacagcgctgaacgcgcttcctttgggtttcaacgatgcaatgcatggatattttcgtgtgctatgcgtcggatatgcgctgtatgcggtcggcaataccgtgatgctgatcctgctgtacttcaccgattattccggtgcgttgactgcatcggcattatttgcagggtcgacggttattttcacggtgattggacagttcttcactaccacactgttcggcttcggttttctgatgggagcgtcgctgtttgctattcatacgacattccggctcgcctcatacaccgacaatctgccataccgagtgctggggcagcagccgattgtggcacagacgaaacgtggacgtttcaccgaactgggcatactgcttgaacatggcgaacaacgaatcgatcaatcactgcatcgcacggaatataaggggcacgtgcggcgcgagtgcgggacgaacattacagaagcgaacaatacaatcggggaggaatcgtaaatcatgacatggtggaatcgacgcaacacaaaagccattaccacgcttgtcaagcaaatagcggcattgatagcaatgctgatggtgctttcctgcgccggatgtgcgacttcatcacccagcgataatgaacaatcgcaatcatcggattcaacgcagacgcatgagcaagtcaagaaaagcgctgaacaaagcatcgacggcgcacacttgcgcgacaacgaatcgttatacaaggtgtatgacgacagcggcgtggaaaccatgtatctgacggtatcgcgcggtaattcgtcggaaggaaccgaccatagctggagtgaaatcaaccagtattccgttgatgactatgcggcaatgggcgttggacgctacaaggtcaatggtttgctgcaggtcggcgacgaacaagggccggtttccggggagcttggttttggcgaaagcgcgccgaacgccaccgtgcaggtacgtggtcagtcatcgagtaaaaacgagcagaagaattacaagatcgagttgaaaagcggaaaaggcaagtggcgtggccagcgtaccatcgcattgaacaagcatatgggtgaaggtctgcgtttccgtaacaaaatggcctttgatctcatcaaaggcatcgaccagatgatggggctgcgcacgcaattcgtgcacttgtatgtgaaagacgagaccagcggatcagattcctttgacgattacggtctgtatacgcaggtcgaacagctcaacaaaaccgcattgcaagcgcacggacttgataagaacggccagctgtataaagtcaattatttcgaattccatcgagacgaagacgtgatcaaactcgccgacgatcccgactatgatcagacgaaattcgaagaaaaactggaaatcaaaggcgacaacgaccataccaaactgattgccatgttgaacgcgctcaacgattattcagtgccgatgagcgatattctcggcaaatatttcgataccgaaaatctcgcatactggatggcattccagctgttgaccggcaataccgatacgcaaagccgcaatatgtacctgtatagtcccacgaattccgacaccttctacgtgctcgactgggacaacgacggcatgctcatgcgcaaggaatatgagatcaaacaacgttccgacggcaaaagctgggagaacggcatcagcaactactggggcaacatgctgtttagccgctgcttgcagaccaagtcgttccgaactgcgctcgacaaggcaatacaagacgaatacaagtacatgaatgccaatcgcatcaactccatggtgaagcattaccgcagcattacggaacaatatgtgtggaaaatgcctgattccatgtatgaaggcgttaccaaaagccaatatgatgtgatcgcgaaccagctgcacagcgaaatcgaacagaactaccagacataccaaaccgggttcaacaagcccatgccgttctacatcggcacacctacccctaccaatggcaagctcaaactcagctgggatgtctcctacgatttcaacgatgaggatttgcgttataccgtcaccgtgtccaaggattacgaaggtaaggatgtagtgttcacacagagcgacctcgtattgccggaagccgtgatggacatgcccggtgaaggccagtacttcatcaaagtgagcgtgcgcaacgcatcaggcgagactcaggacgcgtttgactactacgtcaccgacggcaacaagatctacggcaccaagtgcttctatgtgaaagccggcggcagcattgtggaggatgccaatgttcaatgatggtggcaatcgaggaacgtcgctgctgcagcgcgtcaaacgtcgggtcagcgaagaattatccgttccgccgagcaccgccaaggaacggttccgtcatgagctcaaatatctgatctcatacgcgcaaaaagccgatttgaacgtgcgtatggcgccgctgcttggtctcgacaaacatgcgagcaacggcggctatatgattcgcagcctgtatttcgacgattattggaacaccgcatatcgggaaaaagtcgatggtgtgctgctgcgcaagaaataccgtattcgcatctacgattacagcgaccgcgtgatcaaactggaacgcaaacgcaaaagcgacagttggatttacaaggaggatgcgccgctcacccatgagcagttcgaccgcattcttgccggcgattacgagtttttgcgcgacagcgaacatcaattgtgccgcgagttttatgtggaatgcatgtgcaatgtgttgcgtccgcgtgtgatcgtcgattatgagcgcgaaccgtggattcttgacgctggcaccgtgcgtgtcactttcgatatgaacgtgcgtgcggcggttggaggattcgatgttttcgacgccacgctgccggtactgcctgtgcttgagccgggaaaactggtgatggaagtcaaattcactgaatttctaccgcaagtggtgcgcgatctgttgccaggcaaggcgcaggagttgacatcggcctcgaaatacgtgctctgttatgacaaagcctcgtatttgcggggattcggctactggcaggaaggctggagcgtgccgagcctgtaaagacagtctatgatcggctggcatttcccgaaatcaaacgttacgaatcaaggaagcaagagagaaagaacagcgttatgagcgttaatgacatgatcaaaaagtcggtgctgaaatccttcagccaatacaatgtgcccaaaatggcgttggcattgctggtggcgttgattgtcggcatcgtcatctactacgtgtaccgccgtttctacacgggcgtggtgtattcgcgcagtttcgcggtcacgttggtgggcatgtgcgtgctcacctgcatggtcacgttgtccatcagtactaatatcgtgatttcccttggtatggtcggtgcgttgtcgattgtgcgttaccgtaccgcggtcaaggatccgatggatctgctgtatttgttctggtcgattacttcaggtatcgcggcgggtgcgggcatgtatgtgctggtgattgttgccggattggtgatgatcggtatgttggcgctgttctactcgcatcaagacaagggtcgcgtatacattgcagtgatccactatatgggcgatatggttggcgatgagatcacgcgtgcgttcgggcgtaccaaattcttcgtcaaatccaaaaccatgcgtggcgaacgcacggaaatggccgttgaagtgttctgcgacgacaaggatatggcgttcgccgagcgtatccgtgcgattgacggcgtcgaggacgtcactctgatacagtacaacggcgaataccacggatagttttttcgacgagagggagaccgcgtgaccgacatgccggaaatgggcggaatgccgtctaatgacgagctggtgcctttctttacattcgaagacatcgatcatgcgctcgaaaacggcgaattctgctgttatctgcagcctaaatgcaatgcggagacgggaaccattgtaggagccgaggcgttggtgcgctggaatcaccccaaatatggcgtgattcccccaggatggttcgtcccggtattggaaagagccgggcgtatctgccatgtggatgtgttcgtatggcgcttcgtggctgagatgctgggcagatgggagcatgaaggacgcaatctggtaccggtttccgtgaacgtgtccatgatggatatcaaccagatggatgtggccgacgtgatcggcgggctgctgaacgaatataacatcgacgcgcgtctgttgcaggtggaaatcaccgaaagcgccgtggcgaaaaacctgcccgtggtgaaggataccatccgcaaactgcatgcgagaggcatcgtggtactgatggatgatttcggttcggcatattcctcgctgaacatgctcaaagacattaatgtcgatgtgatcaaactggacacgaagttcatcgaactgagcgatgagaatgccggtaaaggcatgaaaatcatccaatccatgattgtgatggctaagaagctgcatctgatgatcatcgccgagggcgcccagaccaaggaacaggtcgattggctgaaagcaattggatgcggatacatccaaggatattatttctaccctccactgccggtgaaacggatggaaacgctgttggccgagcgtgccgacggtcggcactattgggatatgtcgtgcgattacctgcatcgcgatcatgtgaccgttaacggccgggtgctgttgggagcctccgcgttggcggccgacgcctttgaaatcctggctgatggtctggcggaaatatcccggttgaatgtggcgacaggcgaataccgtgccatcaaacgagatggggtgattcccgatccggaagtcgacgaattcggcgcctacatgcgtgcggtggccaccaaccgggtggtgcatcctgacgatgccggacgattcttcgacgatctgaatctgccttcactccgggaacggctatacaggcaggaaaccatgctggggatataccgtagcgaggtattggccaaaaccggcgtagtcacattcgcggtgattcccactcacgcatgctccccatccaacccttgggctgtggtgctggtcggacagaatctgcctatcggactattggcatgcggcgatgccgataattaccgcagggactcgctgacggggctgctcaaccgcaatgcctacgatgacgacttggagtacatccaggccacgcatgaccagccgctgacggtggtgtacgtcgacatgatcggactgcatgaaatcaacaaccatttggggcatgccaagggcgattcggcgttgtgcgaacttgcggatgcgatgcgtgcctgcttcgatgacgacaggatctaccgcgtcggaggcgatgagttcgtgattgtcagctgcaaccatacggtgagccaaagtatgcgtcggatggcgcgtatgcgtcgggattttctggaaggtgattgggatatatccgtaggcatggccgaatccgatgatggaggggatcttccagacctcatcaatcaggcggaaatccgtatgcgcgaggacaagaaacagtattacgtcaatggtggaggcaaacgccagctccgcatgctcaacaaccggcttgagaatattttggtgcgcaatgatgatatgaaaatgctgcttgaatatctgaatgtacgttatccggtgtcatttatagtcaatctgaataccgatacgcagcgttcgatcatggtgcccgatttctttcagcgtatgcttgatggtcatggcggttccttccgcgaagcattacgtgagttttgcgatgtgaggattgctcccgaatatcaagaaggtctcctgcgactgcttgactacgatgtcgtccgtagccggctcaagtcggaaggtgcagtgcaatgcggttacgtgaagaacgacggtgagcggttcatgttgacgattcttgccgacaacagatccacggacaagaccatgtgggtgttcgaacgtaaggacctgccgtacggaagagcaggttgttcgatggatgatggcaccccccccctaccgattcttaggatggcagagattataaaaacttataaaagaatataaagggcgattgccgcgtttgcctgcgtgcggtctggcttgttttgtgctgatcttggctgagagcgactacccctcagtcggcctgcaaccgataactcccctcaccaaggggagctgtcgttttttactctgcatatgtggatatcgttggtcgttccaccataactagtgcggaacaagggttcgactcgcacattttctgcaggagattgggattggtcatggatcgtacggctatgaagcagcttgaggcttggaagacgtctcgaaatagaaagccgctcattatccgaggcgcccgtcagacgggcaaaacgtggctgtcggaggagttcgggcgtacacgatatgaggcagtggcgcgtatcgacctcatgaacaatgagcgtgcgaggagtttctttgacggcgatctagatgtgagcaggatattgcgtaacatcagcctcgaaacaggtgttcctatcacgacagataccttggtgctccttgatgagattcaagaatgtccgcgtgcattgactgcgctgaagtatttctgcgaagatgctcgtgaatatcacgttattgcgactggctcctacatgggtattgcccgacatgcaggcacttcgtacccggtcggcaaagtcgatacgttgacattgcgtccaatggatttcacggagtaccttcgcgccatcggccaaggaatgatggccgatgctataagcgacggcacaggtattgcagatttggattctgcaaaaagggacctccggcacgaagcgggcactaccttattggatatggcagtaggggtgtctctttgcccctttcaccatcttgcaataattctttcatgtaagaactctctgttaacatgtaagaattattgcaagatggtgaaaggggatgctcatgttgccggctaaagaaagtttgacggttgagttcaagagtgagcagaagcgccctcaatcgcatgatgaaattgttgacaacgtagtggctctagccaataccgaaggcggcacactgtatctcggtattgaagacgatggcactgtgaccggcgtatgtgacgagcatcgcaatatcaatggacttgcggcactaattttcaataagactgttccgcagcttcccgctcgcgtggcgctcttgtatgagaacgaggtgccgatagtcagtattgaggtgggtaacagtcagcaaatcgtgtctactagtcaggggaagacactacagcgccggctgaaagcagacggctcacctgaggtcgttccgctgtttgtttcccaattcattagccgtttatctcagcaacggttctacgatttcagtgcgcaacctgccccagaggctcggttggacgatttgaatccagactcacggaacaagttgagaagccatattcgcagtgccaatgcgcaaaactcgttgttgtcttttacggatgaggatttcgatcgggcacttgagctggttgttgatggcccgtatggattgcagccatctgttgctggtctgctcaccattggttcggttgatgctattcatcgatcggttccagccgcatcggctgtttttcaagtgatgaaaggcatgtctccaaaggtcaatatggatccgttcgtgttgcccttggtggatatgtttgatcgtgtaggcgagctgatggagccgtggaatcccagccacgaagtcatgagcggcttgattcgtgtcgatctgccagacttcgaccgaggggcattccgtgaggcaatgattaacgctttctgccatcgcgattatgcacgaatgggttcggtgaggttcctggttgatgatgatgggttgaccatagccaaccccggaggattcatagagggtgtctccgaagataacctgcttactgcacaaccgcgttcccgtaatccgcagcttgctctgattttgaaagctgccggatatgttgaacgcaccggacgaggcgtggataccatctatgccgggtcgattgcggcgggtggttctttcccggattactcgcagtccagtgccgaagaagtcattctgttcctccgccgtgtggtgcctgacgaggcattcgtgaccatgattggagatgaggagcgtcgacgaggagcaccgttgccagtctggtcgctgattgtgctctcactactgcgcgagcatcgtaggcttactatggtccagttgtgcgatttctcccatttggagcatcgacgcatcgtgtctgctgttgagaatttggtggaagctggtttggtagagggggtcggcagtgggagctctcgctcgtatatgctgagtgcccaagtgtacaaacgttcagaggggttggcgtcttacgtgcgtcagcgtgacatcgatgccacccggcgcagtggccttgttctggagttcgccgaaaaaaatgatggtgtcgtcactacggcggatgtcatggatctattcggcctgagctatatcagtgcataccggttgttgaagaagctcgaagatgtgggcaagttgcgccgcgaggggaatgggccgtcatcccgatacgtgttgggatgattggcgcgcgtgaaagtaagttctttcatcacctttcaataattctttcatgtaagaactctctgtttacatgtaagaattattgcaagatgatgaaagatgcacacaaaaacggggaagccccgctcacatcgagcggggcttccccatatgcgctggtgtgtagatcagcccgtgttctgcaggccggcagcaacacctgaaacggtgcagaggatcagatagatgaatcctgcctgctggctttgcgagagctcttccttgtccaccttcttgcgtagcgacttgagcgccagcacctgggtgacggacagcgcgtccacatacggcgaacgaatgcggatggcctggccgagcacgtggcggtgctgcagcggccacttgtcacccacgatgtccagaacccacttgcgggtgagctccatctcctcgagcaccttcttgttgaggtcctcgcggtcgccgagggcgaggtacatcttggcaatgcgctcgtccgtcttggcgatggacatctcgatgttgtcgatgaacgtggagaacagtggccattcctcgtaggcctgacgcatggtctccagatcgccgaacttctcgcatgcggtaccgaggccgtaccaagcggccaggttgatgcgtgcctgagcccaggagaagatccacggaatcgtacgcaaatcgtctagggacttggcgccaaggccgcgcttggccgggcgggagccaatcggcagcagaccgatttcggtcagcggcgtgacgatcgagaaccacggggcgaagccatcggtgttcagcaggtcgaggaagcggttgtgcgcggcctcgtcgagctgagcagccatgtcggcgtacttcttggtcatgtcggtgttgcgcttctccacgctcggcgcggactgcagcagggttgccgcagccacggactcgacgtggcggatggccagcaccgggttgccgtagcgggcgaagatgacctcgccctgctcggtgagcttgaagcggcacttgacggaaccgaccggctgggcaagcaccgcacggttggcagggccgccaccacgaccgacggcaccaccgcggccgtggaacaaggtcagatcgatgtcgtgcgattcggcccacttggcgatgcgctcctgagcggagtgcagggccagcgtggcggaagtcgggccggcgtccttcgaggaatcggagtagccgagcatgacctcgagcttgttgccggtggccttcaggcgagcctgaacctcggggatcttaatcatttcttcgagcacatccaccgagttctgcaaatcctcaagctgctcgaacagcgggattacgtcgatggtgggcacatcctccgggtgggagaatgccaagcggttgagctcgtagacatccttgatgttctgggcgctcttggtgaaggagatgatgtagcggcgggcggccttgaggccgttgcgcttctggatggccccgagcgcgcggaaggtgtcgagcacctcgtgggtcatcggctgcagatcgccgcgttcgccgtgcagaccatgttcgcggatgtccgcaagggcgcgggcgtgcaccacagagtgctgacggaactccatctccaccatgtggaagccgaaggtctcggtctgccaaatcagatcctgcagcgggccgtaagcggagcgcttggcgccagcctcggccagcgaacgctgcaccaccttgagatcgttgaggaagtcgtcgcaggagtggtacatgaggtcggcatcgcgctcgatggtgtaatgcagacgatcggccatcaccagcatgaccgcgcggtgcatctccttggtggagatcagtgcggccttgtcggtcagacgctcgctcatttccttctggtggctccacaggttcttgagctcggcgctcggcggcgtggtctcggcctccatcgtgaggttgcggcccactgtacgggtggcttcctcgagagcggcgatcacgtgatcggagaacttgcgggccacagcgcggctcaccttggcggtgacgttcgggttaccgtcacggtcggagccaatccagctgcccgggtggaagaacgcggggcaggcaggttcgacgagtccggcctggtcgcccagaatccagtcgtcgaagcgacggtagaccttggggatggtgtggaacagcgtgttgtcgaagatgtcgagaatcgtgtccgcttcctcaaccggggtcggcttcttcagcgcaatcggagaggtgcggaacagggcgtcgatctcgttgtagaggcggcgcaggcattccttcttgtccgagccgccgagaatcttgtattccccgagcaattcggagatgcggcggatcttgccttccactgccttgcggcgtgcttcagtggggtgcgcggtgaagacggggtggaactcaagctggtcgagcagctccttggccttggccgggcccatctcgttgatgagctggtggtaggcgacggtgagctcgttgatcggatcgaccgcctgctcgccggatacgttgttctcgcgctcatggagcacggaaacgcggtagttctcctcggacaggtttgccagatggaagtacgtggcgaatgcgcgggccagcagctgggcatcgtgtagcgtcatgttgtcgatgacgttcacggcctctttcaggccatcctgtgcggggttcggatcctccaactcggcgaagtgttcagcgctggcttccaccgagtaattacgcacggtgtcgaacgtggagagcagttcggggttgtattcgcccagtacgtcacgcaggatcttcaaacacagatccatgtcgtccttgaggctttgggggagatcatgctcctcggggcccttgcggccagttccggtggtgacgatggcggcgtcagcaggagtgatctgttcttctggtgttgccatataacctcctttgccgaatatcaggttgctcggtctgacggtcgtccgcggctcctccgcggttgttgaggccgtccgttgcgagcccacagcctgtattcaacgtggttgttgtgtgagtaacagtgtatccccacgaaatcgccacttacgttacgaagtccatatagtgcgcagcggtgatgttcatttcggggggcatttgcccgaatattggacaacatatgggacgatgtccgaagcgcggaaaaatcaggcatcaggcgattgccgcaggggtaggcggggagtagtaatggacaacgtgagcgaacagaagaaaaataatgcgcctgaggcgaaaggcgcatcggccgtacgaaaattccacacccactctattccgctggacatggaagacattgcgcgtgactgggataagccggtggtggatgccggtatcgcggccaaggcgagcgttattgtgcgcgttggcatgctggatttgggggccggcactggatcgttccgcgtgcgtgagatgatgcaccgcatcgcctatccattgggcgtgcatgtgcgcgccgatgtgaacctgacggacatcgaagctacctgcaccgatggccgcaatcgcatcaccgaagtcgtggatttgccgactaccggcgtgaacaccgaacgaatctggctgcttgagcattttgccgactggttctccgtgaacctcggtaagggatcgatgtatcacgtcgattcgcagttgtctgatggagtggtcaaacatcttgatgagcgcgatgcctcgcagtattcggctgatctgtccaagcggctgcgtgaacgggccaaggctcgtgccgctgcggccgacggcagcgttgatgatgctttggatgtggcgttgagggccaaggtcacggttacctctgtggctagatccttggatgatgacaacgaggaagcgcaccgtctgctggcggacagcgagaaggtcaccccgattgaagacaaggcggccgaggaaaaagcctacgatgatgccgaggtgttcgccggcgattccaacgaggcggtcgaggcggccagttctgccggggccgagagcctgatgcggcatgaggcgggaaatgctccggacaatgacgagaacgctgccggcgagccggcgcgttctgacggttcgggcgtgcgtgcatcggaaggtgacgctgcagatgccgcgactgagccgagttcggccaaacgcaagagtcgcgtgcccaaggaatacgccgaacatttcaacgagcgttccgatgaagagaaggccaagggcggcatcactgtgcgtcaggcacacgagcggctcgatctcatcgagcgccgcaagccgttgtacaaaccgtggttctccggcttagcctccgctttggcttgtgcggccttcgtgttcctgctcggtggtggcccgtatgacatgattggtgcgttcgtaggagcgggccttggccagtggatgcgccggcgactattcgcgcatcatctgaaccaattctttgtcacctttgtatgtgtggctgcggcggcgctcgcctgcacgggcactttgcgactcatcggcatcttcgacccggtcgcactttcgcatgatacggcctatatcggtgccatgctgttcgtgattccgggcttcccgcttatcaccggcggcctcgatatggccaagattgacttcccctctggcattcagcgcgtggcctacgtgctgtgcatcatcctgatggccacgctcgcaggctgggccgtggccgtgatggtgcacctgcacccggaaggtttcgagccgttgggattgaacccgtgggtcaacggtttgctgcggttcgtggcggcgttcgtcggcgtgtggggcttctccgtgctgttcaattcgccgcaacgtatgtgcctgacggccgcgctgattggtgcaatcaccgacacgttgcgtttggaattgcaggacttcagcgtggcacccgagatggcgaccttcatcggcgcattcctggcgggtgttctggcctctgcatggcgttcatccgtcaggcgcggctggttgccaccgcaccttggctatccgcgcatctgcctgactgtgccgtctatcgtaatcatggtgcccggcttgtatatgtaccgcgcgatgtggtacctcggcagcttcgacactgtcaatgctctggattgggcattccgcgcatttatggtgattgtctgtttgccgatcggtttggcgatggctcgcgtggccaccgataaatcctggagatacgacatttagccgttgtgctggctcccctcgggtgaggggagccaggcaacataacatagcgtctcagtatggtgacactggaaggcgcttgagaccttgcatccattaccatcgggcgaagtgcgttgcagtcgtgttcatggttgcggcggccggcacggcgctggttcagcgcccatcacacatcaacacaaactcatgccatggcgatagccgcttggcgtcatgatcgaggagggtcattggccaacgatttctggattctgctggccatggtcatctattttgcggccatgctgtccatcggattcatctactccaagcgctccaactcctcctccaaggaatacttcgcgggtggtcgcggcgtggggccgtggctcacggcactaagcgccgaagcctccgacatgagtggttggctgctcatgggcctgccgggcttggcctacttcaccggcgcggccgatccgatgtggactgccatcggcctggctctcggtacctatctcaactggaaacttgtggcccgccgcttgcgtcgctactcggtggtggccggtgacgccatcactattcctgatttcttcgccaagcgattccatgacgagaagggcgtgatttccactattgcggccgtaatcatcttggtgttcttcagcgtgtatgtgggcagctgcttcgtgacggtgggcaagctgtttgccacgctgttcggcttcgactaccacatcatgatgatcatcggcgcggtggtcgtgttcgtctacaccgtggtgggtggctatctgtctgtggtgatgaccgacttcattcagggcatgctcatgttctttgcgctcgcggtggtgttcatcggcactgtggccagcgcaggcggcatcgacaacaccgtggaattcctgcgctccatccccggctatctctccggcacgcaggtggccgcgcccaagctggacccggccaccggtcagcaactggtcgaggcggggaaggctgtgtttggtgcgccctccgattatggcattatcaccattatttccatgctggcgtggggcctgggctactttggcatgccacaggtattggtgcgcttcctttccatccgcagcgtggaggaagtgcgtaagtcccaaatcatcgccacctcttggtgtgtgatttcgctgggctgcgcagtgtgcatcggcctggtgggtcgtgccatgatgcccaccggactgttgacctccaccgacgcggaaaccattttcatcgtgctggcgcagaccctgctgccgagcttcatgtgcggcgtggtggtctccggcatcttcgccgcctcgatgagctccagctcctcgtatctgattattggcgcttcggccatgggcgagaacatttttcgtggattgctgcataagaaggccacggatcggcaagtcatgattgtggctcgtgtgacgctggtggttatgttcctgttcggcattgtggtggcgtctgaccagaactcttcgattttccaggtcgtctcctatgcgtgggctggtctcggcgcatcgtttgggccattgatgctgtgctcgctgtattggcgtcgtgccaacaaggccggtgccgtggccggcatgttgtctggtacggcgaccgtgctgatttggcataacctcgtcaagcctttgggtggtgtgtttgccatttacgagctgctgcctgcgttcatcatttcgttgctgttcatcgtggtggtctcgctgttaaccgccaagccgaatgaacgcatgctttacgaattcgaccactacatggatgatccgctgcctggcaccctgccgtccggcaccgtgctcgtcgacgaacccatggaagccatggaggccgaagtccgcagcggcaagtgacgcgtacccgctgcgcggttggcttggcgctttatcctttggccccgcgaagtcgcatgaatttgccggcttcgtggggtttcttcgatggaaggatacatttagcctgctctgcaaggtcatcgcatccactgatgcctctttgttgaggtgcggctgtctctattgagctattcacgcggcgttatcggaataattggaagcagcggctcgacattcaaacgtttgtacagcggaatacggcgtaattttcgggcatcgctgacctgtcgaatggtctgccgcgtagtgagctgaaccgttttgcccgtgacctcttgtatcctttcggcgactcttcgggcaagagcctcttctcccgcttcatcgccaatgtctaatttggtaacttgaatgtacttccaaccggcatcctctatcatttgacggcgtcgtgcgtcgttcagccattgtccggcatgatgagatccttcgtattcgatgcatatcttgaattcggggtacgcaaggtcaagatatatgggtttggtgttgttccctacgaatatcgggtaattcactagtgggcaatccaagccatatttcatgagagccaggcgggttcgtgtttccatggaggaatccgtgccggcgcgtgccaaaagtagagcgtggcggcacttcttatatccgcggaacagatacgaattagcgccgctctctttaacggcgcgtacttgagcctcgacctcgtcgagatacagagacaaattatctgaggttgttctgcagagtcttcgatctcggcgcatcatggaatctgcgagaacgacaagttcctcaagttcaagatacgcggcgaacatggcccatgtgcaagccggcgaagtacatgtgaactgcccgtcaaccatgaccgtgtctagtgggaaaggccatacgaccactttgattcccacaacgtgtcgcttggcattggcgtgtggaaccgcaacaatggttgcagttgcaaggcctctgtgtttgctcaatatgcggggcgcctcgattgataaaagctccaacgccgttgtcagggcatagggcggtcgccagccgcttcgccgttgcacatctgcacacgtctgcattcgttgatatttctgcattgtcagctctgtcaatgcgattgagctgcccatgatgatcaccccctcgtgatgttctgctttgtgtttgagaagtgtaggggttgactgcccgctctgtctaccgcctcaatttttcggtggatagatgtggataagtcagtggataactgggggtattcgttgaggtctgtcagaccagtatggctccgaatacattggataagtcatgcggagccctaaatgaggcctgccttccccttgcgcgcgccctccttaccgctggttctggttcacgtggggtgatgggcgcggggaggtggaacccgtgccctttgtaggtgaatcagcgcgttggtctaacagtcccattcatgttggctgcaggacatccgtgattacaaggaacgcagggatttgcgggtctgatggcggggcaccatcgacggcatgattaagcttgaacgaaatccccatggcgttcaagcaaaggtggcatgatggcgggtatgagtagcttggtgcgtattgtcaatgccggtgtttcggggtctcaggaccgtgtggacgtggttcttcgcgatggggttgttgcgtccgtcaatcctgccggaacggacctagcctcgcatggcgcaatgccggctggagcgcatacggcattctcggcgcacacgtcgaacgccgctgacaccggcagcgccccgactccaacgccagccgccgcacctgctgacgaaaccaccatcaatgcagatggcctgtggatcatccccggcctgtgggactgccatacgcacttcacgcaatgggccaagacgttgggccgtctggatctcatcaacactcgctcggctgctgaggcgatggatatgctgcaccgtcacttggacgagcgccgcgccgccggcacgcttgacccggatgccttcgtagtgggcatgcgattccgtcactcgctgtgggctgatggtgagcagcccacgttagccgccatcgacgccgtgaccggcgaccagccggtggccctctccagcgcggacatgcactgcggttgggtgaactctgccgcggctcgcagacttggcgtacatgtggacgaatccggactggtcggcgagctcgaatggtttaacgcctacaccaccttcgacaaagcaccgggcgccgccgaggagaccgatcgtctgctgcgcgaggccgaacaggacgccgcaagcaagggcgtggtcggcatccgcgattatgagatggccgaaaacatcgacacgtggattaatcgtttcgcggctggtatcaatggcttgcgtgtggacgccggtgtatatcccgaacggctacaagtcgccatcgatgcagggtggcataccggcaaggaattgccgggcagtgccgggcttggccatgtaggcgccatgaagctcatctcggacggttcgctcaacacccgctctgcctactgttccacgtcgtattcgggcatcgagccgccgacgtatggcaccctgagctacacgccacagcaaattgaagactatatgcgcttggccaccgagcatggcttcgatattgcctgccacgccattggcgacgaagcgaacaccattgtgctcaacgcagcagctgccacgcacgcacatggatcgatcgagcacgcgcagatgctcaagcccgtcgatatcccacgctttgccgagttgggccttacggccagcatccagccgcagcatgccatggatgaccgcgacgtcattacccgtttctgggccaatccggctggtatcccctatccgttcaaagcccttcatgacgcaggtgccatgctgcgcatgggttccgatgcgcctgtggccccactggacccgtggctggccatttccgccgccgtgttcggcgccgagagctccgatcgcgagccgttccagcccgagcagtgcctagatgtgcgtacctcgctgtcggcttcgaccgccaccggccgtgaccgtcttgcagccggcgacccggctgatgtggtgctgctggacactgacccgtactgcgtgtccgctcctgaagccatgcgtgctatgtcggaacatgtcgtaatgacgttgttgcgcggggaacgtatgtattgatgcaatccatcgcatgaagtgactagatgcctatttcggcggtcgtgttatacgaagagtggcgttgaattttcgaattgggagctacgagcgtctgattttccgtttcaaggggcggatttgagtttctccggaggtctatctccgtttcaaggggctgctcattcgctgaaccttcagtaggaacccatctgtactaacgtcattccgccattttcatgccgtgtctacttgggcatcagccccttgaaacggagatagacctccagaaaacacgaaatcagcccctcgaaacggagatagggcagcaaaaaccgtcatgaagcacgaataagggtttttggcgagcaagctctgtcatgtttgcaatggactctgttcggatctcatgctgtgaggtaggtttgcgcgcccatgcgcgctattttgactatacgatggcgtgaaatcagcggcctgctgtgtcgcaatgcaaaaacgccgtgtcgatcccagttgaggcgacacggcgcttgctgcgagtaacgggaaaaatcagtacttcatgcccatggcctcacgcacctggtcgagggtttcctcggcgatggcgttggcgcgcttgttgccgtcgtgcaggatgtcgcggatgaaatccatgtccttggccagttcggcgcggcgttcgcggtgcggggccaggaactcgttgacggactcgatgacgtacgccttcagcgcgccggcaccggaatcgccgatctcctcggcgatgtccttcgggtcacggccggtcaccagaccggcggtggtcagcagggcggagacctgcggacgcgcaaccgggtcgaaggtgatgcgacgctcggaatcggtcgggctcttcttgataagcttggcggtctcctcggctgtggcgcccagcatgatggagttgccatatgacttgctcatcttgcgtccgtcaagacccggaatctccggcgcttcggacagaattgcggccggctccgggaacaccggattcttcttggcgtaacgctcgttgaagcggcgcgcaatggtacgggtgatttccacgtgcggcaggttgtccttgccgattggcacgacattggccttgcagaagaggatgtcgcacgcctgatgcaccgggtaggtgagcagcaggccggtcagcgcgtggccggaagcctccatctcggacttcacggtcgggttgcggtgcagctcggcctcggtgaccagggacaggaacggcagcagcagctggttctcggccggcacggcggagtgggtgaacatcatggtcttgttcgggtcaatgccggcggccatgtagtcgagcaccaggttcagcacgttgtcctgaatgtgctcggtggtgtcgcggtcggtgatcacctgatagtcggcgatgatgatgttcgtgttcacgccgcgctcctgcatggcgacgcgctcgcgaatcgagccgaagtagtggcccaagtgcaggcggccggtcggccggtcgccggtcagcatggtgaagctcgacggcttggcctcaagcttggcaagcgtttcgtccgaacgcttcttcgccgcgaggaagctcgcgctcatctcattgcctgccgctgtcagttgctgctcgtcggtcatgcgaaatcctttgaataggcctcagataaacgctttttatggtaaaagtgtgagccgacaacgaacaagccagtattagtggtactctctattgttgatgaatcgaacagcacagtaattcgcagggggtcagatgggccgcggacgtcaaaaagcaaaacagcagaaaattgcccgaaagctcaagtacctgaccaccgataccgattacgatgagctagcaaaagagctaagcgagcaggagccgggaacgggctctcctgacccgtttgccgacgttgatgaccagtatgcggacaaggatgtggattccgctgctgacgccgacgccgccaaggtctcgcccgccgcgcaggcggacgacctcgacgagtacgccaagtgggcagccgaagccgccgcaaaggcgaccagcggcgaattcccggcctccgcgccggccgcgcccaagccgaagccggccccgcgcaagccgattccgatgcccatgccctcagcgctgaagccgaagaagagctgaactccattacttattagccgcggatcgattgacttacgcggcgatacttggggtgcactgaggcgtgctgagacgttcgccgtatcgggcttggaattcttgacgtgataacgcctttgtgcagtttgaatgcgcgaatgccgtgcaatgacgtgcataggggagggaacgtgcctgatatcagcgggcgggatggatcgaagcccaccatgctcatcatggacaacgaccgcatggccttgatggcattgcagtcgattctggcgaaggcactgcccgacttcgaattgttgccgccggtgagcgaaggcagcaaagccattcagctgtgcacggccaccaaacgcccgcctgctgtgctattggccgatatcgcgatgaacgacatcaacggcccggatgtggtgcgtgcaatccgcagggaaaacgcgaccacggcgatactggccattaccgcctcgattgtgggccgacatgccaaagagatggcccgggccggcgcgcaaggcatcatgagcaagaacgatgatgtgcggttgcaggccgtggcgattcgtcaggtacaggccggcaaaacatggggcgatggtggcgacgtgcggttcgagaccgcggccgttgcgtccgcgcgcatcaaggccgagaaggacaaccggctgagcgcgcgtgagatggaggttgcggaactgtggtcccgcggccggactatgccgcagatcgccgccgaactgtccatcaccgaaaccaccgtgcgcacgcatttgatgcgtgcggccgacaagctcggcgccggcaatctcaaggaacttatcggcgcgtggattcgcatgaacctgcactgatgaaggcgccgatgggtgtgtggggacgcggtagaagaagcgcaaggcgcataaggggagcggcccggtgaaacgtccgattatcatttcgcagcattcgtcgtattcgtatagtcacgccgacggcaagaagcatcatcagattgatatcgatatagaactcaagcatccgctggcgatgttcggcccgatcggtgtgcttgcggtggcggccatcgtctatgcggtgaccgggtcgtggctggccacggcgtcggcggcgctgacggcaagcgtgctgctggtattactgggcattgcgttgcgctggcgcaagcgcgtggtgaatcaggagaacgaaaacgagcagatggaatcggcgctggccgatctgcgccacggcaaccagctcgcgatcgaactgcacgacacgctgtccaatgatctgacgtatatctcgaccatcgcccggaataatctggccgcgccagccggcatcgatggtggcgactggcagcgcgtgctggatcgcagccaacgtgcctttgcggaagtgcatggcatcatcgattttctgaccgagcagagcggaatggacgccggcttccgggacgagtccttgccggtcggtggcaccgggacatctgaggtggcgactgcagaatcagggcaggttgattcgccgacgaaagaatccgccctggctcgtgacccggtaggcaccgggagctgtccagcgattgcgaatgaggtggttgacaatgctgtgcccgagaacgccggtggcgatgaccgtacgcaatccacagcgggcatgccgcagtccttcgtcacgcgtgtgaaggcgcagatcaccgataccgaggagtttctggaggcgcagggctatcgggggacggccgcggtcaacggcatcgccatggtcgtggaccccgaggcggcggccgaggcgctgtcgctgatgacggagatcggcacgaatatccgccgccatgcaccggcgggagatgattcctacctgctattcgtcaccctgtctcccgaatggattgagattcgcgagaccaacgatatccgtgacgatgccgacgcgcagagtggcctgtccgcgcaggagcggtcggggcgtgggctggccatgcatcgcacccgtgtgcaggagttgggcggtgaattgaccacccgttcggatgatggcatgtggatgatttacgtgcgtatcccgtgcgtgcggggctgatggggcagaagctgcgatgtccggcgtccggcgctgattgtgccctgtcctcacaaatgaggacgacgaccgcagccatgtccccataaccgaggattgcgggtgttcggctcggcggcggctccctatggtggcgtccataaggaccaatcccagggagggcaacgatggcaagtgatacggaattatggcggggaactgattacggatggtggctggctgcggacacgtccggtgcggtcggtgccagcctgatcgcgttcgcggtgccgctgatgatgctcgccacgacaggatcctctgccgccgccaccacgacggaaagcatctgcgtggtggtgcagacggtgctgggccttgccggcggcgtgattcaggaccggtatgatcgccgtacgctcatgctgatctggggtgcgtccggtgtggtgctctcggtggtggcggcggcagcggtgatgctgttcggcaatgcgccgaagacgagcggccatggggttaacggggcaaacgctccggcattcggcggaccgtatgcccacgtgcttccgatcgtgctgctgtgtatcgtcgtgctgttttcggtgcgcgatggcctgttggagaatacgtcgaatgccatgctgcgtggcgtggtgccggatgagcagctgccgcacgcgatggcgctgaacgacgccagggattcgacggtcacgctggcaggcgggccgttgggcggtctgctgatgaccgtgggacatgcggtgctgtttctgaccagcgcggtgctaagtgtgctgggcatggtgtccgcatggcgtattcgccgctattggaaacgcgcaactgtggatgatagcggccattcaggcaatgccgatgatgccgccgatgatgctatcgatgtttccggtgccatcactgctgccccacgctggcgcgacgcactggacggcatgatctggctgctgcgcgaccggttccaacgccatctcatcatcgcagcgaccatggtgaccggtgccagcaatgccttcctactgctgaccgcgctggacatctcccaaggtggcagccagctgatatccgccggattcatcaacgccgcctccgccgttggcatgttgctgggcgcactgatggcctcgcaactggtcaaccgtgtacccggcggcgtactggtgggtgtgatgttcgccctgctcgccgcaggattcaccggtgccgcgttggtgccctccatggttggcaaggccatatttgtggcctgctcggtactggcattgcccgcgggcaacgcggtgcttggaggcctcagcaataccttggtgggcaaggacaagctcggccgcgttggagcgggcagcatggtgttgcagtacggtgcctatggcgtggccgtggcactcgccggctggggtatgcagaccatcggctacggtccgacctgcctgattctggccgccgtgctggtagctgccgccgcttacgcgctgacgatgcgcagcctcatcaccctgcccacgccggaccactgggccgagcatatccagcgctggggcatcgcacagttctgataaagggcatccgataccgggcatccgacgatttacagcggtagcagatcactcaggtcgtcgcgctcgccgaccgcgctgatgtggccggcgtccttttcctctgcccacgtggtgatgccgcaggccagtcgcagccagacttccgggtccagttcgatgacgtccggaggggtcaggttatgcgggtccgattccgggccgtccaggatcttgaccgcaccccacggcgcaacgcgcacctccacgccggggccgggcgcgcgccgctccaacaggaacagcgaatagcgaacggccatcgcccataccgggcgaggcaaggtgggggagacggccagacgggtctgcggggcgccgtgccccatgccgtcggtgttcggggactgggcaacgccgttcgccatcggggtcttgcccgcccgtccatcagcgttgttgccggtggcgcggccggcgccggcgtagctgttgtcggtcgatacagtgcctgtgtcaccgacctccgccacggagattcccaccatttctcgagccgcggcacgccattgcgccagcgcgtcacgcccgcgtttcaagtccttttccagaattacagccatgcgttctatccttgcactgagccacgaaagacggcattgtgcaaacgatggcatactgtgggatgcggaatgataagacatgtgatactctctgactgagaacgtatgcaacaactttctgccaacgctgttacggagagttcatgcacacgtttatgcgacgataccaatcgcgcggcataataagcacgggcacttatcccggaaggaaagtcagaatgaccgaaattaccgcaccgaagtctcccgttacggcggaacagttcgccgacgagattcgtgaacaactgaaatacacccaaaacgtcaccgccgagcaggccactgccgccgacgtgtacgtcgccgtctccaaggccgtgcgcaaccacctcgctgattcttggttcaagacccaggccgacaccgtcaacggcaacaccaaggccgtcggctacctgtccgccgagttcttgatgggcaagcagctggagaacgcactgctgaacgctggcctgaccgaccagttcgacaaggctgtggaagcccttggcttcaagccgaaggacatcgtggacgccgaatacgagccgggccttggcaacggtggccttggtcgtctggccgcctgcttcatcgactctctcgcctccctcggtgtgccggccttcggttacggcatccagtacaagtacggcatcttcaagcagaagttcgacgagaacggcaagcaggttgagaccccggattactggctggccaacgaagagccgtggggtcacaccgactacaaccgtgaccagaaggtctccttcggtggcaaggtcgtcgaaaacgccgacggcaccaagacctgggaaccggcctggtccgtgcgcgccgtgccggtggactacatggttcccggctacaagtcccagcgtgtgaacaccctgcgcctgtggaccgccaagagctacgacgagttcgatctgctcgccttcaaccgttccgagtacatggacgccgtggccccgcaggtcaaggccgagaacatctccaagattctctacccggaagactccaccaaggtcggtaaggaactgcgcctcgagcagcagtacttcttcgtctccgcctccctgtacgacgccatccgcgtcttctacccgggccaggacaagccggatctgacgaccttcccggacaagatcgtcttccagctcaacgacacccatccggtgatcggcatccccgagctcatgcgcatcctcatcgatgagtacggctacgactgggataccgcgtggtccatcaccaccaagaccttcaactacacctgccacaccctgctgccggaggcccttgaggtctggtcggccagcctgatcggcgagctgttgccgcgtcacctcgagattatcgagaagatcaacgcgcagttcgaggccgagctcaaggccaagggcgttgccgccgacaccatcaaggacatggccatctacactggcgactccgtgcgcatggcttacctggccacctacggtggctcccacgtcaacggcgtggctgagctgcactcccagctgttgaaggacgttaccctgaagaacttctccgatgtctacccggacaagttcaccaacgtgaccaacggcgtgaccccgcgtcgcttcgtcaagctcgccaacccgtgcctgtccgacctcatcaccgagggcctgggcaccgacaagtgggtcgccgatctggaactgctcaagggcctcgagccgctggccaaggacgatgagttcgtcaagaagttcgccgccgtcaagaaggccaacaagcatgcattcgtgggcttcgccaaggaccactacggcatcgatatcgacgagaacaccctgttcaacaccatggtcaagcgtctgcacgagtacaagcgccagtctctgaagattctcgccgtaatctccacctacgccgacatcaagtccggtaaggttaaggccgaggacatcactccgcgcaccgtgttcttcggtgccaaggccgctccgggctactacctggccaagatgaccatcgagctgatcaacaacgtttcccgcgtgatcagcagcgattcggccgtcaagggcaagctcgccgtccacatgctgccgaactacaacgtcgagatggcccagaacctcatcccggccaccgagcttgacgagcagatctcccaggccggcaaggaagcttccggtaccggcaacatgaagttcgctctgaacggcgccctgaccgtgggtacgctggacggcgcgaacgtcgagatccgtgagcgcgtcggcgccgacaacttcttcctcttcggcatgaccgtcgacgaggtggaagcccagtacgccaacggctacgatccggccaagtactacgaggccgatccgcgcctgaagcaggccatcgatctggtggccgacggcaccttctccaacggcgaccgcaacgcctactccccgctcgtggctgactggctgaccaaggactggttcatgaccttggccgatttctccgcctacatgggtatccagtccgagatcgaggccctctacgccgacgagctcgaatggaaccgcaaggccgtgctcaacgtggccaactccggctacttcagctccgaccgctccatggaggactacctcgagcgcatttggcacaccgctccgctcgcgtgattgcggagcgtcctcggcgttgctcctcggtcgacgtaccttcgtacgcctttcctcggtgcgccttgaggccgcacgcgcaatcgcgctcgctccgctggcctgatacctggctcctgctggcgggagctggctggcagagccagaccgagggtggtttttctgtgaccgcccccagtcagctgtgctgacagcccccgccagcgggggcgaagatctagctaaacgccaaagggccctgcaaccaacttcatacgttggttgcagggcccttcgtgtgttgaaagactgtgtgggccatcaggcctcagccggagcctcaactgcaggctgctcgccgtcggcctcgtcctcggccttgttcaggcccaagtcaaccggcgaggagctgttctcccacggctcctcccacggatcataatccgggttctgctgcttgtagatgtacaggccaactactgctgccagtgccgcgccgaatagcagtgcgaagaacttccaaccgttagaagacttgctctccatgacggctcctttctgtgaggacatctggtcggtatgcccattcaaaccgactctgcaccccattctatgccgtcgtttgtgacgattgggtggggaacacctatcgcatgtattgctcatggcatagtagctccgagcatccggcgcgttggatacagtgggcacatgcatatgcctaccaaacaagaaatccgctaccaatgggagcacggcggcccggtgatggcctgggcgctgattgccgcatgcacagcagtatggctggtggaggtactgctgggtttcttgtcgccgacgttgcagaactggctgatctaccgtggcatgttggcaccagccacaatgttggctgaaccgtgggccatcgtcacctcgatgtttctccatgcgcccaactcaatactgcacatcctgttcaacatgattgcgctgtattcggtcggcccggtgttggaacggctcatcggtcactggcgattcctcgggctgtacatgatttccggccttggtggcgcgctgggcatgatggtgtgggctgtcgtggcccctggcggccaaggctggcgaacggccgcctacggggcttcaggggcgttgttcggcttgttcgccgcattgctggtggtatatcgccgcatcggggcggatatccgttcgatgctgatatggatggcggtgaactttgcgctgccgtttgtggttggcggtgtggcttggcaggcgcatgtcggtggctttgtggtgggtggcttgctgacatggctgctgatcggcggcatccggccttggcgaggcaaaagccttgcctggcgtatgcaggtgtatggctggtcggtgaccgtgttggtcatcgcgcttatcgtggcgtgcaattttgccaatccatatggctggatgtggcgctgataccgttgtggattcctccggggcagtgtccgatcatcttgtcgacttgtgcacaactgtgcatgaaagtgcataagacggtggataacttatgtggataagttggccataatcccgtaattcaagggatatgtctgtggataacttaggaaagagacgcgatgttatccaatgatttcccgcctcggcaaccgtttgtgcaccggttatgcaccaaaaagagcctgttatccactagttatccactatgttttccacattctgtggaaaactacacgcgtgtaattcatccacagcaggtggataacaatgtggataactagtggataaccggtggatagttgtgggtaagtgactgcgcgagggcgaaggaggccggagcggcggcaattgccataatggaacaacaatgtgccgtacgccggatctgctgacaaaggcggctcggcacccgtcgcaagacaaaaacgcaaaaagccggccctgctcgcaagcagaaccggctttcgtaataagacgataggcgaactcagcgccagcccatagtcatcaggaagccaatcataatcagggcgaaaccgatggcaaggttccaagcgccgatattcggaatcggccaggaaccggacggggaaaggtagtacaccacgcaccaaatcaggccaatgatcatcaatgcgcagaataccggaacaaaccaacgcgggttggacttggtgcccttgatggtctcctcaacgcgcttggtgttctccgcctgacggctcatcatgcgctgcatctgcggggtcagcgtggccttgtcggcagtggcgttcaggacagcttcgaccttctccatgtcaacgccgtagttctcatcctctgcagcggtctcgtccgcagcgttctcggacttggcggcatcgtccgtggcggcctcagatgaggtctcgccctgccagtccttctggtcgttcgagtcggtttcgtgcagctcttcgtcagccatcagcatagtctccattcagtaggctaaaagtcataatagtggctacactcgaaaccagtaaactcgccgcgtataaagatgggaaatcatgtccaggcacgtaggcaaacacagcacgaagcgctctctgctgggaggcgttgcggtgttcgtcgtcgtcgctctgactggttttctgctgagcaccaacgtacgcgtgaaccgtacggcgaccgttaccaatgacacggcagatctggtggaacaaggcgtcagcgaggtcaaccaactgcagaatgacgtgaacgatttgcagcggcaggtgaccaatctcaccgatgtgctgggttccggcgaccggaatgccggcgatcaaagcagccagggagacagcagcgacaacagccttatgatgcccgagctggagggcgctggtgttaccgtaaccctcaacgattcgccgttgtgggaaaccgcagtcaacaacagcggttcgaccaccaacatcaacgattacgtgattcatcagcaggatgtggaatccgtggtgaacgcgctgtgggcgggcggcgccgaggcgatgatgattatggatcagcgcgtgctgttcaattcggccgtaatctgttccggcaacgtgctgtccatacatggtaagaaatacgcgccgccattcaccatctcggccatcggggatcaggcctccatgcgcaaggcgctgaacgattccgaagccatcaccattcttaagcaatatgtgaccgcattcggcatcggctacaaagtggagaacaaggacgatcttaattttccgtccaccgcggccttgctgcagcagctgaaatatgccacggtgaatgagacgcagtccaaggacgaggagaacacccaacaatgaggcacggcaaccatggcagcgacgccagcatcgcgatggataatgtgcctgcatacgcagcgggcgcaggcagtgccgcatcagtgcagccatcgcgcggcggtgactcgcgtcgcaggccatccgctccgaggcgcggcgcattatggcaggtgctgggcatcattgcggaactgttgctgaccgccgctgcgatatgcgcgctctatatcgtctggcagatgtggtggaccggcgtggaagccgaacaagtccagaatgagaccacgcagtccgtgaattggtccgaccccagcaacaacggcggtgatgtcaaggtggccgaggcgcaggaaggcgatccgccggtccagcccgaaaaaccggcgtatggcgatctgatcgcacaggtgtacatccctcgttttggctctcagtggcaccgcaacttggtggagggcaccacgctggagcaactgaaccgtcacggtctggggcactatcaagacacccagatgcctggtcaggtcggcaactttgccgtagctggccatcgtaatggctacggacagccgcttggcgacgtggacaaactgcaggaaggcgacccgatcatcatccgtaccaaggattactggtacgtctaccattacacgcgctatgagattgtgctgcccaccgacatatacgtgattgcgcccaacccggagaactccagcgtggagcccaccaaacgcatgatcaccctgaccacttgcgaaccgaagtacagcactccgacccaccgatggatcagctatggcgagctcgcatattgggccaaggtgtctgatggcgtgcccaaggaactggccaccaccgattcgtccggtgaggtgcgttttgccaccaaggagaccccgtccctggtttccaagatcggttctttggacaaggtggtgtatggcgcactggtggcatggctgattctgttcattgccgcagccgtggcctggcgctggccggtgctcaaggcgattcgtctgggcgaacgccgccgccctgatgccagcatctatggcacgctgctgcgcttgcagccaggcgtggcgccaatccgctggctactgctggctgtgctgctgtttgccggtgccgcggccctgttccagtgggtattcccttgggcggccgccaacattccgttcctgcagcaaatgtcgaacttcgtggtgtccaactaggccgtgcgcatgttcgggtgcaagcacggcaaagcgctgtagtatggcttgcagcataggtttttcaaggagagcagtatgaccgattccgcacgcatcttggtggtggataactacgattcctttgtatatacgattgttggctatctgaagacgcttggtgccacgattgacgtggtgcgcaatgatgccatcgatcccgccgcgcccggtgttctggacggctacgacggcgtgctgatttcccccggacccggagctcccgccgaatccggtgccagcgaggatatgattcgtctgtgcgcagccaccggcgtgccgatgttcggcgtgtgcctgggtctgcaggcgctcgctgaggtctatggctgcacagtggatcatgcgcccaccatcatgcacggcaagaccagcttggtggagcatatcgatgatgagattttcgagggcgtggccaatccgatgaccgccacccgataccattcgctggccgttgagcccgattcggtgccggatacgctgcaggtcacggcatggacgcaggacgaccacatcatccagggggtgagggtcaaggacaagccgatgtatgcggtgcaattccacccggaatccgtgatgacacaggatggctaccgtctgctggccaattggctgaaggtgtgcgggcaggataacgccgtagctaaatccgccggattgcagcccaaagtcacgaagtaacgagtaatgattgacccccgctagcaggtatcgctagcgggggtcaatgctcatcatcggtcgcgagacgggctattgcccgttagtgttggtgtggccaccactgctgttgttggtattgctactggccccagccttggtcgtgatggtgacagtcgagccttcatcgacctgcgaaccgccagccggatcggtgctgaccaccactgcgttgctgtcgcttggtccgctgacctgtacagtgaacccggctgcctccagcgtgagttttgcagtcgcgtagttggtgccggcggcaatggtcggcacggtggcctgctttttgccggcggatacccaaatggtgatggtgccgccctgttcgatggaggaaccggagccgggttccacgcgggtaatcgacccggcaggcaccgaatcggaattctcggattccacggtgaagttgaatttgtcgttgtactgctgcagcacggcatcctttgcctggcccaccaggttgtccggcaccttggtcatgccggtggacacccacagggtgatcgacgagcccttggtggcggactgcccgttggcgggatcggtgcgggtcaccagatccttggccacggaatcactgtcttcggtcttgaccacggagttcacttcaaagccggcatccttgaggatattgcgggcctcatcctgagtgcgcttggaaacgtccggaatggagatggactgcggtccggccgagaaccatacctgcaccttggaacccttgaccaccttggtgccggccttggggctcattcgcgtgcatgtaccttccggctcggtggaatcggtgtcacgcttctccaccatcgtcaatcccgccgccttgagcttggcgtccatgccatccttggatgtggatgcggtgcattcaggtatggcgaccagctcttcggtggacgtatgcgacccgttcatggcaaacgctacgccaaccacgatggcgataaccgcgattaatgccacaaccacaccaataatgatgcgcttgcgcttcttggccttggccgcagccgcacgctgctcggcacgcgacttgacgtttgcggcattggtgccattggtgggcgagatctgctcgaattggccggttaccggattgaatgcctgcgtaggctgctgaggctgtcccagagctgcggtcggcaggtcgcgctcggcatccctgcgggccttcatgttggagaggtcggtcagggggttgaacgcggccgccaccggaacgccgccgttcatataggtcaagacatcgttcttgaactcggaagcagtggcataacggttctggcgatccttggccatggccttggcgcagattgaatcccacatcttcggcaggcccggtactacggcggaaggcggcgtggccacctcggaaacatgctggtatgcgatggccacggcggaatcgccggtgaacggcgggcggccggtcagcatctcgtacagcacacagccggcggagtacaggtcggaacgcatgtccacggtctcgccgcgtgcctgctcggggctcaggtactgtgcggtgcccaccacgccctgcgattgggtcatggtggcggccgagtcgtccagtgcgcgggcgatgccgaagtccatgaccttgaccacgccctgctcggaaatcatgatgttgccgggtttgatgtcgcggtggatgatgcccatacgatgcgagtagtcgagggcgtttagcacgccgagcattacctgctcgcagtcgcgctggctcaaggcgccgttcaccttgatgatgtcgcgcagggtctggcccttgacgtactccatcacgatgtacggcagatgctccacgtcgccgttatcggtggtgaccgtctcctcgccggaatcgtagatgttcacgatgttcgggttgttcatctgcgcgaccgcgtgcgcctcacggcggaagcgggccagaaatatgtcgtcgttggccagatccgcgcgcatgatcttgatggcgacggtgcgccccaagcgggtgtcgagagcgacatggacttcagccatgccgccgcggccaatgagctggccgagctggtatcggccatcggccagtgcagtaggcatattgctgctcattgcttattccctcccaataatgaggccggagcctccataacgatgcgcggtgtgctcgacaccctacggggcagacggctaccggacgtgatcatggtgctgtcggtcatttcggtctgctggtcaagcagacgacgttcgatgcgggccagtgtgcgggacaccaccagagcgtccttaggacggtccagcggatctttggccagcatggacatcacgaattcatgcagctggatatccacagaatcgggcagcggaggcacggcattgttcacgtgtgcggccgcgatatccactggagtggcaccggtgaacggacggtggccggcgagcccttcgtaggccacaacgcccagagaatagatgtcggattgcggcgtggcctgctggccctgcgcctgctcaggcgaaatgtactgcgcggtgcccaccaccatgccgtcttgggtgatctgaccctggccggtggaatagctgacgccgaaatcggtgattttcacctcgccgctatcggagaccatgatgttggccggcttgacatcgcggtgaatcacgccgtgtgagtgtgcgatgaacaggccgcgcgcggtctggatgagaatgggcagcagttcgatgggatccatcgcgcccttctcgcggaacaaatcggccaacgacttcgagggcacgtattccataatgaggaatccgatgccatcatgctcatagtattcgaacaaggcggcgatgttcggatgcgccagattggcggagttgtgggcctcggcacgcagacggcgaagtttggcctcggcattggtcatgtccgaacgcaaagccttgatggccacctcgcgtccgagctggatgtcgtagcctttccagacctcgcccatgccgccctgcgcaaggcgcgagtcaaggcggtatcggcggtgaatgagctgtccttcgatgagtttcattgctgcagcgcctcctgaatcatcgcgcgcataatcgggcctgcgacgaacgaaccgtacagatctgtgttatgcaccagcactgcgacggcaatctgcggatcgtctgccggcgcgaagccgataccccagccgtcgatgctgctgttatcggtgccgatttgtgcagtaccggtttttgcggccacagatatgccattgatggcaagcgtcgggttggccttggtaaccacgctttccatcatggtggtgagcttgtctgcagtatccttgctaaatgcctcggccatgacctgcgacttggtttcggaaagcacggtcagatcggaggcgcgtacgcgatccatcagggtgggacgcatcagcttaccgtcattggcgatggcctgggcgaccattgccatctgcaacggcgtggccgtggtgtcgccctggccgatggaggccaatgccagtttgtcggcggtggagctggacgggaacgtcgatgcggtggctgtcatcggggtgccggtgttctcggtgccgtcaatggtaatggtgctgccgaagccaagcttggtggccatatcgctgaccttgtcttgtcccagagccacgccaagctgggcgaaagcggtgttcgaggaccaggtaatcgcgtcctgcagcgaaatctttccgtcagtgccgttggcttggtacacggcgttcggcaactgggtattggtgccaggaagcgtgtacgagctacctgcgggaatctgcgtatccgtctggtaatcgccggtttccagagcggcggatgccacgatggtcttgaacgtggagccgggcgggtacagctgtgaggtggcgcggttgatcagggggctatcgccgcctgccgcaagctcgttgtacgtcttggcggcggcagcggaatcatgggtggccagctggttcggatcgtagctgggggtgctcaccatggcaaggatgcggccggttttcacctcgatggccacggcggcgccgtccctggtgccgagctggtcgtacgcgacctgctggatcttggggttgattgacgtctcgatggacgcgccttgattggcgctgccggtcagcatggccttggcgcgctgccagatcagcgagtcggtctcgccgctaagcaacatgctgcgcgaggcttccaggccgcgatccgcagtctggttgatggagaagaatccggtgaccggtgcgtacagcggtccattcgaataggtgcgctggtacttgaatgcgtcatttaccggctccgattgagccattaccgtgccgtcggaggccaaaatggcgccacgataagcgccaagctgatggtagagggcacgggcgttgcgagagtcgttgttcagcgtgctggagctgatggccatgatgatggtagatgacaggccgagtaccacgaacagagcgatgacggcggtaaacagctggcgcaggtatttgttcatgcgcgttcacctccgttggatgtgtcgatggggaagttcgtctggatctgcggcaccggtggggcaggaggcatggatggcacctggggcaccgagggaatgaccccggtacggaccgtgtactcaggttcctcagcggtgtttggaatctgcgggtcgtttgcttcctcagacacgtcgtgcggcgtggccgaggctacacgcgggcggacaatgggctcggtggcgcgtgcgcgggccttaagctccttgttgcgcaacgccgcaagcgcttcatgctggaaggtatctgaagtcagctcaggctccggctggttcgccgaattggaaatgacgataagcaacgccgcaagaatgtagttggcgataagactggaaccgccggctgccatatatggcagggtcaggccggtaagcggaatgacgagcgtgatgccgccgaccacggtgaatacctggaaagccatggtgaacaccagtccggaagcaagcagcttgccgaaaccgtccttgattttcatagcgacgatgaagccggaagcgatgatgatcaggtagagcatcagaatagccatgacgcccaccaggccgagctcctcgccgagggaggcgtagatgaaatcggagttggcgaaggtgaccagagatggatggccctggcccagaccggtaccgatcatgccgccggatgccaggccgaaaatgccggtgaccagctgccaagagccgccgggggacttggtgtactgttcgttgctgaacgggtgcagccatgcatcgactctcgaacccacatggctgaacatgcttgcggccagcatcgcacctgcggcaaaggtgatcagaccgatgacgatccagcttttgcggcctgtggacgtgtacagcatggccacgaacatggcgaagaacatgagcgaggtacccagatcgtgttgcacgacgagcactcccatcgaggcgatccacaccacgatgatagggcctaagtccttgatgcggggcagctgcaatcccagcacctttttgccgccgacagccagctgatcgcgatgatcgaagagataggcggcaaaaaagaacgcgagaaaaagtttggcgaattcaccgggctggaagctgccgaggcctggaatgcgcacccagatacgagcgccgttgatctctgtgccgataaccggcagcatgggggaaagcagcagtatcagacccaccaccatcgacacgtaggaaaagcgcctgagaacgcggtaatctcgcaggaagacgatgatcagcgtcgaaagcaccaaagcaacgtacagccatatgatctggcgcttggcgatatcccatccctcgctctggtcgatgcgggcgatcatcgtgatgccggtggcggtgagcagcagtacgcacggcatgatggattggctggcatacggctggaagcgggcggtcagcccacagaacacgaggaacagtgcggccgccgcgcacaacatgatggcgtattgcacggggaatgcgccggtggtgcgctggaacatctggatgaacgccagcgcgctgatagccacggcaagcaggagcagcgcaatttggcggaaacgggtagcgatcattgcgatcctcccgtggtggcgtcgtcggctgccccaatgccggactcggacttgttggtattgccggaagtggacgagttggatgagcctgacgagttgctggatgtggacttcttggcctgctcgctctcctgctgcttcttggacttgttcatttcgctacgaataatgcccacatgcgattgggcctcgtccaaggagcccaccgaaataccccgattgagctgatcgcgccaagtctgcggcagattcgacacggtaatcgaggtgctggaaacctcatgagacagcgccaagccgaacagattagtaggtacgccttggtaaatagccactttgccgttgctgttgccgacgtaataccgggtctggctccacatgtacgtgccggtgccggcaccgaacagcaccgccacagccagaagaatggtgatgactatggccaatcggttccgctgatgcttggcacgtgtggctttcttctgctccacgtgctcgtccctgatggccttggccacctcgggatcgttcgggtccgcggaaagacggccgtcaggcttttgcactaccggaatttcgccagtatccgggttatcgcgctcgccggtctcctcgcggacggcggagggctgcaccacacgggtggtggatggctcggcgctggctggcgctgcatcgttatgttgcgtgtccgctggctgcatcagtgccgcagcgcgtttggcgggcgaatgatcgtccctcagcgcgggggcggtggccaccggttcgttgacgatatcggcaatcggctccaggttgcggctggctgcgccgcccaccagcggggtctgatgtggcagatcgaaggcgtcggcatccaaagccagcgtggcgtccgcaatcacggcggtgacgttgtcggtgctgccggcgcgtagggccatctgcaccaagcgttgcgcgcattcgccttgatcggccaatgcggtcatcgtctctttgatggtggagtcttccagtacgccgcacaggccgtcggagcacagcagccagcgatccgcggggtgggccttgcgaatggagatgtccgggtgcgggtcgatgtcgaaatcaccgagcacgcgcataacgacattgcgttgcggatggttcttggcctccgcaggtgtgatgcggccggtgtcgatcaggtgctgaacatagctgtgatcgcaggtaatgcggctcaggtggccgtcgcgcagcaggtatgcgcgggaatcgccgatatgcgccactacccagtagccggcgaccaatgccactgcagtgacggtggtgcccatgccagcgagcttgcgttcgcgcttggccttgccgacgatggcgtcatgcgcggccataacggaggtttccatcatgcgggagatgacctcgacatcaccgccggtatcgtcctgctcaatatgagccagagaccggatggcgatggaagatgccgtgtcgccgccggcatgaccgcccataccatcgcaaatggcgatcagatgctcgccggcgaaggaggaatcctgattgttcgcacgcacggtgcccacgtcggacacagtggtggaatacaggaacagtggttgtgaagcggcggaattaggcatgcggctacctcagttcaaaggttgtggcgccgatgcgcacggggacgcgagcgggcagaatggtgggctggctgatgcgctgctgattgaccacggtgccgttggtggagttcagatcttcaatagcccactggccggaactgggatcgcgatagacgcgggcgtggtgggaagacacgaattcgtcgtctaagaccacggtatttgacgcggcgcggcccaagccgatttcggctccggtgagtggcacggaactgccggccagcgggccgtcaataatcaccagcaaagtggggttgacgtttccggaggcaaccggcgcgctggacgaagtggcacgggagaccggtgcttgcggcgcttcggccttctccttgtgcatctctcgttcgcggcgacggcgagaacgagacgggcgcgggctgaacgtctcgatgtctttgtgcaacgaacgtaccgccagccatatgaaaacccacagtaggatgaggaatccatacttgagcagggcgaatgtcagttcggtcatagatagatgactttcgggcggggcgctcgactactcctgcgcttgcgcggaggcccagtacaggatgcgcgtgcggccgatggtgatggtgttgccgtcgagcagcgtggcggcgggaacctgatggccttccacgtatgtgccgttggtggaaccaagatcgcgcgcgattacgccgttgtccgtgatgtcgatttccagatgcttgcgagagatgcccggatcatcgatgacgatgtcgcagccggagccgcggccgatcatcgtcttgtctttggtgagcaggtactggttgccgttgacctcgagcacggggctgtcttcggtctgggtgtctgtggtgacaggcacggcgttgccctgcacggattcggaggcgaggttgaagctgcccttggacagatccaggtcttcttcaaagatcactacgaccgggcccacgaaggcataatgctggctcttggcgtactcggtgaggttgtcggcaagctcgttggccaaagtttcgctgccccatgcttcgatgcggtcgaagtccggagtgctcagcttaaaacggtattcattcggggccaccgtgcggtcacggcccacaggcatggcttcggcatcaatttcacgctccagcgcactggagaggtcgacaggctgcaggtctttggagccgaatttggcgaatactccgttgactgcaccctccacgcttttttcaaaacggtcgagaacgctcatagtcctccctttctaatcttcacctatcctacgcggctgtaggaatatggggggtaaaaacaggcccgtttgccggtgatgagtgcaaaatttccaaaaaatagacaggaaaagagggcgtgatgtgtcgttcggcacatctcagtggggtggaacagccagtttgtggcgggtgcgccccactactggcctctcagcggtgcaaaatatccagatgctggcggttttgccctgctggggagctgccagtggggcaaaaccaccagttcgtggtgtattggcttcgctgaaagcgtctcagtggggcaaatcttccagtatctggtaagacgtctccactgagggcttgctggtggggccaacttgccatgtactggcagaatcgcctcactgagtatgtttcagtggggcggaacagccagttcatggcggttttgccccactggaggggattaggacagcgcctcgcgtaggaagtcgcgctggagtgtgagcagattctcggccaccgtttcgtcgttggtcatatgggtgatgcccgtcagcggcaggaaggtatgcggacggcctgttgccatcaaggcttgcgagagacgcaggctgtgggcgatggtgacgttgtcgtcggcaaagccgtggacgagcatcagtgggcgtgtgagcttcggcgcgtcttgaacgatgccgttgcggtaatacacgtccgggtcgaggcccagataacgctcggtgtagtgcgtgtcgtacagcgtccagtcggtgggcggggcgccggcgcaggcggccttgaacacgtcgggtgcgtccagcacggccaacgcggagaggaatcctccgtaggaccagccgatcatgcacaccttatcgaggtcgggcataggaattgcctcccgcttgcgggaggtggcgcaaggcgccgatggacggttctcagccttggctaaatcgccctcggtcaactgcgtcgagagtccccggtcggcgttcagcttggcgatggcctcgggcagagcgttgacggcctcgacctgatcggccaacgtcacgtccttcatgtcttcgaagatttcgcgatcccaagccgggccgcgaccggtggtgccgcgattgtctgcggtaaccaccaggaagccttgatcggcccaccactggctttcccagtagaacgactgcgaggcgatgacctgctggaatcctgggccgccgtacggcttcatcagcaccggcagcttatcggcgtgcgcgtaagggctttcggggcttggcgcgataatcgccgtgtacatctggtgctcgccgaggcgtgtaaaggtgacgttcggcgtgaatccgggttcggcagcggtgctggcgatagtggcttctgctggtccttctccctgggaggaactgtcggccgtagggagattgagcggagtctcggtcgtcaccggtgcgctcccctcagtccgcttcgcggccagctcccctcggagaggggagccaaggatgtggaacatctgagcattggcatgggtcatgtcgcgaccggaaacgaccatgccgtgctcggcgcgcgaggcggtccactggccaggcacagtggtcacgggtgtgatatcgccgctgtaatcgatgctcaccacgtcgaagcttcgagcatcatgcccaccaatcatggacgcgatggactcgtcggatgcgccagcaccgttggtggtgccgtcgtcatcgctggactcggcccatgcggacggcacctcgggggcgatctccggcgcgcgctgcactacagccagcacgtcggtatcagtcacatcgagcacagtgcgcacattccagccggcgggcgtgaacggccggccatccacggtcagacggttggtatcggtgtccatgtcgttcaacgagcacaccagacggccatctgtcgtgtaggcgggcgtgccctgaatcagatcgatccattgctcattcgcatgctcctcaagtacgcgggtggcgccgagcgtcggggtggacgatgcaaatgaagaggtctcgccgatttcgttgtcgccgccgaactccacgacatcagttgccacaatcctctcgctctgatcggcactggctgcctgagcccaagtggcggcaacgtcatcgctcagcgcctccggctcttcggcggtctcaaccgccacctcgagcacctgatcgcgggtctggcggcggttctgcaccagcaccagaggatcatggccgcgctgccaattcacggcagccacatattcgtaggcttcgcgatcccatgccacatcagcattgccggtgatgccggcgtatcggtagttctcatcgaacgcaaggctgattacggtcagatacacatcggcattgcgggtcagcgcgcgcgggtagcggcgaccggtggcagcggtctcgggattggccggatcgctgatgtaccaggtcggttcatcggcggtatcaaaggactcgaatagcacatgctgcgaatccggcgaccaccagaaaccgtcatagcgatccatctcttcgccggccacaaactcggccaaaccaatcttccaggtgttttcagctgggttgccgtcctcgtcctccacacttacgccgtagatggcggtgatacggtcggtgagcggctggtcgccgtcctcctcatcgccgtacaggccctcactccgcgcggattcctcggcatctgcctctacttcaacgccgttgtccagctcaccttcgggcacttcgaacggttcaccctcagccggccaatcgccaatgtcgaccagcatcaagtaggtgccggtggtgtacagcacatgctcgccgtctggggcgatgcgcgggttgagcaccggcgtatacattgccggatcctcgtccagccattcgccggccagctcgcgggtgcgactggtcggcgcgccagttgcagcatcgttgccaatctccgtcagaaacagccgaccattgatggtaaacaccacgcgatcaccatcggcgtcaacggaatagctcacgatgccagcgccgccttcacgggcacgttcgcggcgtgctttctcctcggccggcacattttcgctatcagcggtagcgcccagtagctcacgcggatcggccagcttggtttcgtgatgctcgctcgagtcatcaaaccaactcagccacaatgcggtgacgagatcctcggggccgtcggagcgcaggaacagcgctcgcgaaccgtcgcctatggtttgcgcggaacgcggggctccgcaggtgaagcgcagcgtacgtgccctgcgacgaggcagattggcgattgcatcggtaacatcattggtttcgctcatgcttccaacctacgcgcttgtacggtcagggggagttgctgccggcaacgaagcaatacatcggttcgttcacaattttgccttgctggcggctcctcagtgaggcattttgtcgactggtccgaggttttgccttgctaacggcctctcagtgaggcaaatcatcgactggtccgaggttttgccccccgcaacaggtggtgggcgataagaatccgctccggcaggcttgctggccgtaagatagtggacatgcaggtgacgatgatcgacgaaaacaagtacgccgaaacgatgacggacgtggtgctgcccgccctcgagcaatgccgagatgaaggctggtacgacccgtccgctgccgagcgatcggctagtattgagccgctttccggcattatggatacaggcggacgctctggtcaactgcactacttgtgctacgactcggccaagttcgacgcaattcgcgagcaaggcgccaccgccaccttccgcggggccatcgtcatcagccacgggttcaccgagttcgcggaaaaatatgacgagctggtctggtacttcctgcttgccggctattcggtatgtgtgctcgagcatcgtgggcacggcaaatcttcccgcgacgtcgagaacccatgcatggtgtggatcgatgattggcgccgatatgtggccgatttggccggcttcgccgaaaccatcggccagcagtacgcggccggcatgccgctgaacctgttctgccactcgatgggcggcggcatcggcgcactggtgcttgagcagtatccgaccttgttcgacaaggcggtgctctccgccccgatgatcgcccccgccactggtatgccgttgggcgtggcccgtgtgctggtcggcgcgctgtgcggtctggggttcggcaaaaagcgcgtgttcgggcagtccgactttaccccggaattctccatggaaggcaacgagggcgcctccgaggcgcgtgaacgctggtatttcaaactgcgttgcgagaaccgtgagtatcagacctattgtgcggccttcgaatggatgcggcaggcgctgaagatgaaccgggctgtgctcagccccaccgcctgcgctgaagtggagacgccagtgctgctgttccagtccgggcgcgatatctgggtgctcaacaatccgcagaaccgtttcgtccaactggtcaaggacggcggcggcgaggcggacatggtgcgttaccctgaatcgctgcatgagattttctcgatgccgaacgccatctacaagccgtacctcgagagaatcctgagcttctacgacgatccgatgattgccagcgccacgtactgattgagtggaatatatcagaatttcactgtgggtaaaactccggaatgattgccgcgctctggaattgggtgaagtgaaggtcaaaggttgagagcccgggagggttccggaaccggccgcgataaccgctgccagccccgcgatacgggttgacggctggtagccaagccgattctctcctgatcaaggagtaccgattatggcaatgtttccggctttgatgaatgacactatgttctcggatctgttcgatgacccgttctttgagggttggcgcaacacgaacaacgcgatgagcgctgcaatgcctgccaacatgatgaccaccgatgtgcgcgagaccgataagggctacgacgtcgacatcgatatgccgggtttcaagaaggacgacatcaaccttgagctgaacaacggttacctgaccgtgtccgcgtctcgcagcagcgagcatgaagacaaggatccggctgctgaaggtaaggactcggatgagcagtgcgcttgcgcgtccgattccggcaagtggctgcgccgcgaacgctacatgggttcgtgctctcgtagcttctatgtcggcgatgacgtgaaggaatccgacatccacgccagctaccagaacggcacgctgtgcgtccaggtgccgaagatgcaggctcagccgcaggttgaggccaagcatcggatcgcaattgagggctgattgagattgttgcgctcagtctctcttgaagcttagcttcgtagtgtgcttgcccggtgtccagcatcgggcttgttgcccccctctgacgaggaggctgtcagcgaagctgactgggggagagattagcgcaatcgattgcaaactagactctgttccctgcgctgtctgtcctacgctttcaacaccgactattgtgacagacggcgggaaacatagccaatacgaatgccggatagggtgtatgccctgcccggcattttgctgttttgagcaccctgttttgccatgttcttattccggtcgtgtgccgttctgccactgtacatatccgatgggtagagtgacttcgaaacgaggcaagagaggacatgcatatggcagacgacgcgcgcaacgcaagcggcacaccggcaccgacggcaagtcatgccggccattccggcggacatgttgtttcctcccgtgccactgcggtcggcctgatggcaattgtgctgtggagtttcatgaccggaacggtgcgcatcgtcgccgaaggcttcggcgccacgctcggatcggccctgatatatacggtcggcggtgttctgctgctggtgttccgccgcccggcgccaatccgtgagttccccaagaagtatctgattatcggtggcctgctgtttgtgttttatgaatcgtcgatttcgctttcgctcggtttggcctctacggccgcttcgtcggtggaagtgagtctggtcaactacctatggcccacgatgatggtgcttctggcggcgggcgtatcccgtcgcaggcatgcggtgtggaaggtgctgccgggcgcgatcgtggccacggttggcgtcgcgctggcggttggtggtaattccgggcttgactggcaggcagccgctggacacatagctgataatccgctgccgtatgtgttggcttttgcgggcgcgctcgcatggtcggtgtatgcggtgttcacgccggcctggtcacatggagtggatggcacttcggtgttcttcccgtgtgtagccgtggcattgtggattatccattttgcttccgggcagggctggcctgcagagcctccgagtctggtcgcatggctgttcgtcttcattgcggctgccgcaatcggcggtggctatgcctgctggggctacggcattctgcacggctcgatggagcggctggccatcgcctcctatgccacgccggtgctctccactggggccagtgcggtgctattgggattggcgttatcgttgccgttctggtgcggtgcgctgctggtggccgctggttcggtgctgaactatctggtcagcgcgcgtcgctcagaccccaccacgtagtgaaatctccaccacgatgtgaattgcccaccacgaggcgtctcaaaacggcttaattccgcgaatcatcaaatcccgctcaccgcgtgatgggctttttactacgcggtgggaggttcaccgcgtagtggaattaaccataatcacttgccccggcgctcggacgggcggcggatcgggtcaagcagggcgtccggattggaaatgccgaacatgctgcgtccgccggtggattcagggtgcttggcgaggatggccagagaaatcgcacccggaaccagaatgatcacggacagggcggccaatccccagttcacaaagaatccgaggcacagcacgatagccgccacaaccaccacggtgccgataatggtcagtcgcgcctgatgtaggttggagacgcgggtccaggaagcattcttggccgcggcgacgtcggtctcggatgacttgccggcggaagtcgggcgttgttcgttcgcgttcgttatacctgccagcatatgccctgacgtctgatgatgcgttccggacaaagtctgaataaaggttgagaactctcgggatgttctgtgaaatccgacactcttccctgaattgcgcgataggcttacatgagctcttgggaagcgtgggggtgaaggtatgaggaactccgtctggaagacgttgatggagctgtcgctgattcggggaatcgttcctcagaccgtattcggcgtgaccgcagtggcggcactcgtattgctgatcggattggttgtgggcaagcggaaccgtgcgcatcgcatgcacccgctaatcgtgtcattgatcgtcgccgtggccgccggtgctgtaggcctgttggcggcatggttggtatccgacgtgttcatggcattcgaggtctcgctcggctggccggtgatctttaccatcgccggcggcatcgcggcggtcggcttcgtaattgccgcagctgtgatcgtccaaggactgcgccgcgtcgtcgccatcattctggtgccgttgatactggtctccacggcactcggcgtggattcgatctatggcgaataccagaccattggcaacctcgtcggctattcgccatatgcttcgctgagctcggtcaaagtgcacgaatccgcgatgagcgtggaccaatggcgtaagcgtgcccagcgcaacgatttgcccgacatgccgcaaaccggcaaggtgcttactgtcaccattcccaatacgaaatcgaacttcgccgcgcgcccggcaatgatctatctaccgcccgccgcgcttagcgagatgcctccgacgttgccggttatggaactgatggccgggcagccgggcagcccgagccgccttatcgacgcgggcaacatcgcggcaatgatggactcgtatgcggccaagcatgacggtctggcgccaatcgtgattgtgcccgaccagaatggtgaggcgtcgcataacagcctgtgtgccgacaccacccaaggcaatgccgagacctatctcaccaaggatgtggtcgtgtgggctaagaggaatctgcctgtggccaagtcggcgaagatgtgggcgattggcggcttctcgcagggtggcacctgcaccacgcagctcggcccgcgtcatcctgagttgtacggcgcgatgctgccggtggacggtgagctcaagccgacgaatggtacggtcgccaagatggtcaaggagtatttcgccggtgaccagtccgcttatgacgcacaggtgccggttaatgtgattgccgccaccggctcgtcggaccaggcgctgttctccggcgcgggcgaacgggataaagagtcgatacataatatgcgtctgattgcccaagccgcacgcaaagtcggcatggacgtcaccgaactggtcgtgccggataccggacatgactggcatgcggtgcaagccgtctggcgggccgggcttgactggttcggcgaacgaaccggattgggtgagatgccgcaaccgttgaaggactacaaccaagtggaggtgttgcaatgagcgacgaacagcagcatgagggcggcaggaagccgcagacctcgcatgcgtccaagtctcatgcgccgaaatccggccatgttgcggacagctggcgtgaactggccgaggacgcgcggcagtgggtggatggccataggctggccgttgtggccacgacggtgctggtcgtgctgaacttggtggtatggctggtggccgccatggccggattcgcgttcccattgcgcctagacaccagtatggccgagttcgatctcggcaaactggtgtgctcgttgttcctggcgcgcggcgtgatccagctcatcattgatgccgtgctgtggctcgtcatgttctccatcgccgagccatggctgggtcgcacccgcaccgttgctgctgcgctcgcctgcgctgctgcaggcgcgattatcggccttggcctgtgcgcggcggccggttggctgttccaggattcccagttcgtctcccgcatgcggtttgccctgagcccgctggtgctgccggtcggcgcattgatggcggccagcgccttctgcggccacctgtggcggcggcgtatccggctcatcggatatgtggcgattctggtcgcgctgctctacagcggcaaccccggcgactactgcattctcgccgccgcattgctcggtcacatcgccggccgtgtgatggccggtccacccgcgcacgccgaaaccggctggcactggctgcgtagcacctcattcgaagcacgtcgcatgttcgccgccatcgccgtggtgctggcgctggggccggtcatttccatcacctcgcataaccatgccgggccgttgagcacggtcggcctactgatgagcccggcttccgtcgacaacggcaccttggccaaatgcttggccggagccacgcacagcggttgcttcctgcaattcgacctgttgcgtgcttcgatgcctggcgcggttctgcgctcgctgctgcccacagccgtgaccttggtgctggcatggggcctgtatcgcggtcgccggtttgcggccatctgcgctgtggccatcaacctgttcactgcgggcgtcgccattgcctattatctggtcgtgccgctgagctttgcgccgaacggtatgacgtccttgctgcagcatggcgcgattaccgcttgcgtggcgaatgctctgccaccgttgatttttgccgtcgccttggctgcgatgctgaagcatttcccgattcgtgtcggctggcgccggctgatcggcggcgtcggtgtaatcgtgctggccttactggcctgcgccgccgtgtaccttatgtacggcatcgcccagccggacgcgtttgcgcctcgggccacggcgtcgtcgctgttggccgaactgccgggacggttcctgcccatcgggttcctgagccatatgaagttgtcgttcgtgccgcgtacgccattggcgtccgtggtgtatcagggcgttggcttggtgttctggatcgtggtgctggccgtggtgatgcgttggatgagcgacgtcagtgagtcgaatgaacgggcgcaggcccgtgccgaacggctggttgagaccggcggcgaatcgatgagcttcatgaccacgtgggaaggcaacgactattggctgtcgcccacgggcaaatcggccgtggcataccgtgtactcaacggtattgcgttgacctgcactgggccatttggcgatccggcggagtggatggacgatctgaccggattcacgcagtattgcgtggaacggtcgtggtcgccggtgttctacagtgtgcatcgcgagcagcgtgatgcgctgctggctgagggatggaactcgattgaggtcggtagtgaaatggttgtggacccgcgtgtgtggaagaccaccggcaagaaatggcaggacgtgcgtaccgccatcaacaaagccaagcgcgacggcatcaccgatgtgcagtccacgttcctggaatcgccgctggaagtgcgtgagcagattgaggacatctccgaggaatgggcacagctcaaggctttgccggagatgaagtttacgttgggcggtgtcgaggagctgcgtgacccgcgcgtgcgtcttctgtatgccgtcgatgcggatgggcgtgtgctgggcgtcaccagctggctgcccacatggcgtgatgggcgcgtgatcggttggacgctggacttcatgcggcatcgtaccgacagtcctaacggcatcatggagttcctgattgcgcgtatggccgagcgtctgcgtgatgagggggctgcggatccggagcgtgccgcagaattcatgagtttgtccgcggctccgttggccggtatgaaccccgagcgggacaatgccggcgaaggtggtgcgccggccggggaaggcacacaggtgctccagcatgcgctgcagatcgtggccgattggatggagccggcgtacggcttccattcgttgttcaacttcaagcgcaagttccagcccaccgaggcaccggtctacgtgtgctacccggacccggcggcattgccccagatcgggctggccgtggtgcgcgcctacgtgcccagcgtgacgcccgccgaagtggccggcatgctcagcacgctgcggtcgtagggtgtggggcgtacggaccctgacaattgtgttcgcggttgaggctctaggccgtttgcctgttcgtttacgtacggaccggagactggccgattcgagcccaagatggggctatctgctttcaaagaggtgccttcagcttcttgcggatagctaactgccttcggaggggtacctgaaccctgaaatcccaagtatgagcgttgcaatgacggcgtttgtactcgggatttcccatattcggtacccctttggacggagatagcattccgcggaagcccgaatatacctctttgaacggaggaaccccagcgaggagggcatagaagtcgctatctccgtttcaaggggctgattcggcctgctccggaggtctactctcgtttcgaggggctgatgccgaagtattcacgctccgaaactggcggaatggcgttggcgcagatgggtttctacatgcgttctagtggatgactagccccttgaaacgaaagtagacctccggcggaggccgaatcagcccctcgaaagcgtttttgccgttgcggagattttccagccgtaccgtgaaccgtctcaacggtgtaacgtggggcgtatgagcgaacttaccgaacataatgacggcaacacgcaggtcgcatacttcgccggcggctgcttctgggggctggagcgctacttccagaacgtcgacggtgtcacggacaccacggttggctacgcgcaatccacggtcgaatcgccgacctacgagcaggtgtgcgcgggcggcacggatgcagccgaaaccgtgcaggttactttcgacccagcacgggtaagcctgcggacactggcattgctgttcttggaagtcatcgacccgttctcggtggatcagcagggcgaggaccgcggccggcaataccgcaccggcatgttctacacggacgagacgcagcgtgccgtgtacgtggcggccttggagcagctggtcgaccgtcagccgcagcgcccggccgtgttggtcgagccgctacgcaatttctacccggccgaggcccatcatcaggattatctgatcaacaatcccggcggctactgccatgtgccgattgcggcgattgcgaacgtgaagcgccgccagaagtacgtggagcgtatctgggacttgacgctcgagcagttcgcggtcacgcagaacgccgccaccgagcgcccgttcgtcaacgagtatgacgaggagttcgagcccggcatttacgtggatatcgtcagcggcgagccgttgttctcttcgcgggacaagttcgactccggctgtggctggcccgcgttttcccggccgattaagggtgacttgctgactgagcacgaggatcatcgcattccggggcgtgatcgtattgaggtgcgcacttccgacacgcagattcatctgggccacgtgttcgccgatggtccggccgatcgcggcggcctgcgctactgtatgaattccgccgcgctgcgattcgtgccgcgctcgcgcatggccgaggaaggctacggcgactgggttccggttgtggatggggaagctgacggtccggtcgggaagaccgatcagcctggggcagctcacgaacggtaagccgcgactgtacgagctgcatgagatgtggtattttgctgaatataagcgccgaaaggaccggacagcaacatgagcatggagaacattgcgggcgctcgcaaacctgccaagcgtgaggatgagcggacggttgccggcgaacatcgtatgatgcgtcgcgcggaccgtgaggtgactgaccccgagcagatcgctgcgattatcgccgcttgcgacatcgtcgaagtggcatatgcggatgctgagggcctggccatcgtgccgttgaatttcggatttgattatgagtatgacgaggccgatggtgttgccgcaacagccttggtgaacggtgctgagacggtcggcagcacgggagtcgtggcagccgatgaggtggggtgccccggcaaactgacgctctggttccattccgcgccgcacggtcgcaagctcgacgcgattcgtgccgcagccggcgggcgtctgcccgtggcattcaccatgcaggccgactgcgaggtggtggcgggtcgcaccacgtgcaattggggcgaggcgttcaagtcgattgtcggcaatggcgaggcctcgctggtcaaggatttgggcgaatgccgccacggcttgcaggcgctgatggcgcagcaggcgcacatgccgcacgtcgaattcaccgacgcgcaggtgcgcagcgtcacagtgtggaagatcgaggtcgattacttcaccaccaaggtccgtgccaagcccgcgcccgcgcacatgcatcagcgccctgccgtgccgcgcgcaggtgtgatcggtgcccgataacatcattgcagcaaggatgggatgtcggttgtggtgcggctcaacggttcttaacgtaccgggtgccgcggccggcgcccagtttggtgatggtgccgttgtcaagcagtgtcttcagtgtacgttcaacagtgctggcgctgatatcgggcaattgtcgaagtatgtccgcttttgagagcggcgataatatgcgatcaaatagattgccgatacgctgctccttggtgggttttctattgctgccccagccggacacttccccaatccgttcgtcgaactctttacaggcagtgaggatgacgccgagtaaatagttcacaaatggtgcatagtcgttgacgttgtcgttccagccgtatgtgctcgcggcaagtgcctcgtaataggtgtctttggtccgctcgataaggtgttcaatgctgatatatttacctacttggtaaccattgcggtagagcagtagcaaggtcagcagccggctcattcgaccattgccgtcattgaatgggtggatgcaggtgaagtcgaaggtgaacattgctgtggcgagcaatggatcgatatgtccgtcttggatggcttctgtataggcggcgcaggcgcgctcgacgagctccggtgtgatgagtgcgtttgggggagtgaaacgaatgatttgttttccggtggcgtcgcgctcgatgatgacattgtcgctgtctttgaaatgtccgccgaaagcgaggccagtgtatcggaacagatcgcgatgcagttggaggattgtatttggggtcggtggaatgtagtcgtggctttcgtggatggtggcgagtacgtcgcgatagccggcgatttcctcctcggcacgattgcgtggcgtggttttttctgcaaccagtgcgttgagtcgcttgtcgctggtagagataccttcaatacgattggatgcgttggtgctttgaatgcgtgcaaccgtgatgagtgtgttcagcaaatcaggcctgattgcagcctgtacgctttgacgacctttggcttcgtggatggcggatagcagtgttgtggtttgtggggtgagcagttccttggcggcggtgatgtagtcgaagtgcttcattgtgaacctctttctgcatcatcgaatagttttctgcatcatattctatcaatatgatgcagaaaagtggattgttattcccctgatgatggtgttgctcaaatctcaccttccgctggcgggaggtggctcgcagcgccggtgggtggtttgctctcgaacccgatagacttgccgcatggcagcagtgacagtggtaattaccagttgcaatcagggtccgttgattcgcgaagcagtcgagtcggcattgtcccagacggttcgcccggaacgcatcatcatcgtggatgatgggcctgatgatcaagcgtccgtcaatgtgttgagtgcaattctcgacgattgccggcatggagtgccggatacgggcggtgtcgccgtcgatcttatcgggcaggtgaatgccggtccttccgctgcgcgcaatcgtggtgtcgccgctgccgagacgccgttcgtggtggtgctggatggcgatgaccgtttgatgccgaccttcattgagcgtacgttgccgttgctggctgctgatgattcgatggttgcgtcctctggttggctgcgtacgttcggggttctggactcagtggtccaaccgaccggtggcgacgcgggtgcgttcgtgtcacataactgctgctcggccacatgcatgattcggcgctcggcttgggaacgttgcggtggctacgacgagtcgatgcgcagtggctttgaggattgggatttcttcttgtcgttgctggagagtgggttggctgcgaaagcggaagatggtatcgacggtattggggatgccggcggtatcgatgataccgatggtgtcgaggatgctggtagtgcaggcggtgctgtggatattggcggtactaaggataccgggaacattgaggctgtcagggatgccggtaacaccaagaatcccaaggagggcacggcttgcatcggcatcgcccccgagtccctaatcgagtaccgcacggccccggcctcctcaaacgtgaccagcatgaccaagcgcctcgatctcatgcgcttcctgatcgccaagcaccgcgatctctacgccgcgcacatcgccgacgccatcctcggcgttgaagccatctccatgagccgcttaaccatgtgggaatcgttgatgtgcggtgacaccaccgccagtcaagccttcatgactcaccccacctatggcgacggtggaatggccgccgccgtacgcttgcggagttgagaggcatcagctgaccaaatgccgatagagctccggatcgattggccgggccaaccgcaggatcgacagcgtgaccttcacgctgccttgtccgcttgcgtcaggtttggtggtgagctgagggttgtcaaacgcggcaacgtggccaacgtagtagtacttaccctcggcttcttccgccttgcgcataacgaataacgggacgaaatgcgtctggccccaattcgggccaatgccgttaagcgcccatcggaattcgggagactgcggagttcgtccattcttgctgaagtatttcatttcctgtgtgctcaggaattcatcttcgtattgacttgccgcgtatttcacgaagatgggcatggtattggtttccttgtcgaggaggtaaccacccacgttttgcggagtattctccttcttccatccgcacagtcgcatgacgtctgccatggaatatttgcgttcgtacaagaacatgtggtcaaagacctgttgcctggcggcggcctcacggaatatatctcggcaattggccataccggtgcgcagagtgtccgcaaagaagatacggaacgttctgttcgtggcaagcatatcggcgaatctgctgttcaatcgatatgcggtaccgttttctgtgccggtgctgttcgcggcttcgactaatggctgattgccgaaacgattgcagtttgggccggtgaaatatgagtaatcgagcacgctgatcgcagagtcgaattgcgtgtctgaaccatcggactgcgggaattcagtacgaatcgcatcgagcaattcgctgcggccgattggcgagcccgcactccaatgctgcggtacgtcgtcgtcgagccgttcgctgacgaaatggcatagctgagcaagaatgaccaattcgtgcggtcgcaatccgggcagcagcagctccgctgccatcttgagtatcgcgtcttcaacgtcggtcaccggctccaactgatcctcaaatgtcgcttcatgatgtttgcctttgcccaggcttttttcacgggaacgcacgaaatcaagatagttgctgcgcttcgatgcgatggtatacggcagtgaggggtcgtagttatagatgtccgtaagcatggggatgcggcccagctcgtaacggacttggcgatactgttcggacagctttttcatgtcggaccagtcggcggtgtccaaagacttaaggatgcgctccttggcgatcgggtcgaaactgatggacgacaggccgattgactttctctgcaggttcttgcgagctctgtcgcggtcgccggtgttgccgtataacgccaccggaatcagatagttgttgttgtaattgccaatgaaatcgataaccacaacgctttctttgtgcgggaatttgcgcagtccgcgcccgagctgctgcgtgaagataatgctggattcggtgctgcgcaacatgacgatttggttgacggcgggaatatcaactccctcattgaacatatcgacagtgaagagatagtcgagttcgccttcaatgagcttgcggacgtattcgtctcgctgcgtttgggacacgggcctgccgtcatcgtccgtgctggtaacggcagcggtgcgataggggcgttcagcttgttgattccactgttggttaaacagctgggatagcttatgggcttcctcctgtcggctgcagaacacgagtccggtgaccggaatgttgaactgcccatattcttgcaacttgtcaatgatgtagcggactcgcttttcggtggcaagctgctcgatctcgtacttgagctgtttcgagtccttctcatcaaggcccttggagacatcgagacgatgggcgattccattcggatcgtcgttggagccaaggtattccgcaacaccgtagtagtggaatggacagagcatgttctcatccaacgccttctgcaagcgaatttcgtacgcgatgttatgcccgaatagctcgaagatgttgatgccgtcggtgcgctctggcgtggcggtcatgccgagcatgaagtcggcatctttgaaatgattgatgacgcgctgatatccttcggctccagcgtgatgaacttcgtcaaccagaacgtagtcgaattcatcggatttgaattgcgccaaaacctccggctgccgcatcgtctgtaccgtggcgaatacgtagcggcggtcctgttgcttgctggtgcctgaatacaatcccaattcggattcatcgcagccgagcaccttttggtaagacttcattgcagtttgaagaatcatctgctgctgggcgatgtacagcatgcgcttcggctggcattcgcgtacgtcgaatgcggaaaggtgcgtttttccggtgccggtggccgacacgataattgcgcggtgctcgccttgttcacgaatcttcttgagattcgccaacgcctcctgttgcatggcgtttggctgaatatcatgcccctcaagcgactgcagaatctcatgacgcggtggggcgtatttcttgaaatcttcctcatactgtttgatccattcttcggtcagcggaacggaatcagccacctgtgagtcgatttcatcctggaactgcccgaccagctctccatccgccagcgatgagactttgagattccattcgcgttgcgtggtcaatgcggctccagtgagattggaactgccaacgtacaggtcgtaatagggtgtgccgtctttcatgcggcgagaaaagatatatcccttgggatggaatggttgtccttgagccattgcggaaactgaggtattacgggaaccttcccacacgcgaacgtcaacaccagtggtgttctgaagatgcagcagctcccagaatgccctgggatcgttgaaatgatttttcgttgaggtaatcagtgtgcccgctcgggtcgctgtttcatggtgacttctgaagtcttcaaataagctgagcacggcctcagccgagacgaatgcgacagaaatgtcgaaggaatcgctagtagccaaggaattgccgatttcctcgcgcatggtcaatccaccggggcgatttgcgatgagggtcggcttatattcgccgggagcatctgagcgcggctcgatcagacctgagatgacatcttcgaggatcgagggggttggatcagaatcgtgatgttgcgtgttggctggagagtctgaggtgctgaccagatttatagacatgttgccctgttcccttgcgattcggatcgtttgatgaatgcctgactgcgctgtggcgcgttcatcggagcgccagttgtttgttcgcgataatcgcgactgcttcgcgatctaccggagcccagttcaatgtcggcatatcagcaggattcagccatcggatatcagtgtgctcggtgagatgcggcgtaccggcgatgaggtgacagatgaatgtggtgagccgcacggttccaaagtcgtaggcgtattcgctggtacatacctcttccgcgacctcaacttcgcataacagctcttcttcgatttcgcggtgcaaggcttgccgcgctgtttcatgaggctcaattttgccgccggggaactcccaatatccggccaacgactttcccgggccacgttgggcgcatagtacggtgccgttggtgacgattgcagctcctacgacgttaatgattttgcgttcccgctccatgaacaaccaggatacaacgcttcaagatccacaagcgatccacgatcctcggcggttttgcaatatcgatcctgatgcttttgattatgcgatcggacgggtcgaaaatgtcggtgtggacgctaccgactattgtggtgagcaggagaagcagtctgtttccgaggtgagattcgggaacggtccgactctcggcagtgatttatccacgcagacaagccaaaggagcctcgccatgatcctcgtcaccaccaccccgtctgtcgacggatacaccatcaccaactaccagggcatcgtcttcggcgaagtggtgtccggtgtgaacatgttcaaggatcttggcgcgggcctgcgcaacatgttcggcggccgcagccagggctatgaggaagagctgatgcgcgcccgtaacgaggccatcgccgaaatgcaacaacgcgcggaggcgatgggtgcgcacgccgtggtcggcgtggacatcgactacgaggtgctcggcgccgacaacggcatgctcatggttaccgcgtccggcacggctgtgcagctcgcgcgcaaggcctgaaaatacctatattgagggcggtcgggtggcctgcttggctgcccacgcagttcgtgcagcttacagcgcgcaaacaatcagataaatcgccacgacgtggcaggcgtacccgatgaccgtgcccaagtgaaacacctcgtggaactcgaaccagccggggacggggttcggcttgcgcagcgcaaaacacacggcgccggcgatatacgcggcgcctccgcatgcgatgagtatagtcgcagccggacccactgcgggagccgtccatagctgcggaataagcgtcaccggcgccaatcccagcacaacatacacagtggtgaacacccagttcggggtgcgcagccagacgatatgcagtatcgtgccgatcgccgcggtcacccaaatcaccgtgagatatggccggcgaatcgccgggctgagcgcgaacagtacgggcgtattggtgccggcgatgatgaggaagatgttcgaataatcgatgccgcacagtacgcgagtcaccttcgcgctgcgccacggcacgacgtgcagcagcgcgctgttgccgaacagcagcatggccgaggcaccgtacactgcgcaggccgccttgacgggaccggccggcgcgatacaaatgagcacgatggacgccgcgatgcacagcggcagagtggcgaggtgcagccatccgcgcagtcggggtttgcgattgccgaatgcgtccacggggacgacgcggcgtctgaccgctttcagtgctgccttggcctgacggtaacgtgattgcgcggccttgtagcgggccgatgcgcgatccagtgcggcggggccggtgcttgcaccggacttttggctcacggtcacggaaggcgtaactgttgaggcggaagccatttttcgcccagatggcgtactgatggaaacgctcatactaatcacctcgccatggccggcgacgctctgccgaccactaacttacgctaccgtaacctagtataggtcgacacaataatcaaggttgattcgtccgacagatggacggacaaaaatcctatgaacccagcaaagcggtcctcggtcccggacaaagcaaaagggctggaacctttcggttccagccctttacttgctggtgcgagtggggggagttgaacccccacgagcatacactcactgccacctgaagacagcgcgtctaccattccgccacactcgcagacaatcgaccaacttacacccagccgtccaatcgcacaacgtccggcgtgtcgcgttggtggcggacatgtattgttcgtgaatctcctacgggtgctgtgattttttgagtgtagcgctgctcccctcggtcacttcgtggcagctcccctcagagagggaagccagaaggagattgcgcaagctacggctaggctcacaggcctggtttgcgctcgccgttgccgtagaagtgtgccagagcctcgtcgcggaactcgtcgaagtagccgccgtcgatcgaggcgcggatgtcgtccagcagtttcacgaagaaatgctcgttatgaatcgtggccagtgtgaacccgttgaactcgcgggcgcgcagcaggtggtcgacgtacgcgcgcgaataatgctggcacgtgtagcagtcgcacccttcctccagcggcccgaaatcgaacttgtgctgggcgcgcttgatgttgtaccggccggcgcgtgtgtagatcgcgccgttgcgggcgcagcgcgcgggggccacgcagtcgaaggtgtcgccgccgttctccacgcacgcgaagatatcgtccacggaggcgatgcccagcacatggcgcggccggctctccggcatcgcgtcgcagatccaggcgcaagtgtcgccgatgatgcgtttctcgatcgcgccgccaatgcccacgccgtcgaagtccagcgacgcgatctgcgaagccgcgcgccggcgcagatcctcataattcgcgccctgcaccacgccgtacaacgcctggtagggcttgcccagacgcgctgccgtcagccgctgatgttcctccacacaccggcgggcccagcggaacgtgcgctccaccgaatcctcctgataggaccgcgtattcatcagcgtggtcagctcgtcgaacgcgaacatgatatctgcgccaattttgtgctggatgcccatcgaaatctcggcagagaaccggtgcgcgtcaccgttcaaaggagatttgaacgtcacgccgtcctcgtccacccatgccatgcgttccttgcctttggcgatgatgtcgtccgacttcatgccggttacatccatcgccagcgtcttcttgaatccgacgcccagcgacatcacctggaatccgcccgaatcggtgaacgtcggaccgtcccaattcataaagcgcgccagcccgccggctgcgtcgagcacatcctcaccagggcgttcaaacaggtggaaggcgttggccagcaagcactgcgcgcctaactccttcatctgctcgggcagcacggccttcatcgcggcctgcgtgcccaccggtacaaatgcgggcgtgcggatgtcgccgtgcggcgtatggataatgccggtgcgcccgtagcgggcgccgtcacgccccaacccgttcgctgccgaaggcagccgtgtaatcgtctcgaagtggaaagcgctgcggtcgccgggctttccagcctgcgctcccagcggatggttcaaaacatcgcttgtcatagtttcactttaggcaaaagggccagaaattgtgaagaactcggtttcgaggggctgattttgtgttttccaaacatctatctccgcttcaaggggctgatgcccaagtagacggctcacaagaatggcggaatggcgttaacgcaaggcctccgacactctggttgagtcagatgaacagcccctcgaaacggaagtagacatccgggaatcgccggatcggcccctcgaaaccgagatacccatggtgctcttcgatgattactcatagactttcaactaacgttcagaaaatctccagattaactgcctttactactgaattagcgcatgagagtggcggcgaacaagcgcccagagccgctgaacaaacgtgataggaattttagaaaaggagcagcaatggctgacgaattcaacccgcagggcgtcgaccagaccccgcagaacaacgaaaatcccgccccaaacggcaacgagactgagactcaggcatcagctcagaccgcagctgagggcgatgccgcaaccacttcatctcacgaggacagcaacccgacccagcagatgccttccgcgcaagacgatgccccgaccgctgccaccgagcccattccggactacgccgcagccaagggcgagagcaccgtggtctccagcgctccagcctccactccggcgctgcagacacgcagtccgcaactccgctctaccgcccagccccggagttcggcgcatatggtccgactccgacgcagcccgagcagtccgcacagaatgccgcaccgcagggtcaggccgccaacggccagcccacgcagcagttcccgtacggccaggcctctttgccgcagccgcaaggccagcgcaacccctacttcaacaacccgcagcaggggaacggcaacccgttcaatccgcagccacagcagccgcgcaacaacggcaatccgttcgccaacccgaacggtcagcagccgccacgtggcggactgttcggcttcggcacgcctggcgccggcaccccgaatggtcagggtccccagggctcgccccagcagcccggccagcccaataagcccggcgcttccaaaacggtgaacggtatcgtcaccgccgtggtggcggcactggttgccgccgccctgtgcctgggcctcggctatgcggccatcaccaacggctgggtgactgtcccgacctccagctcgctctcgaacgtcacttcaaacaagtccggctccggctctgccactgccaagactggcgaagcccccgattggcagacagttgctagcggcgtctccggctctgtggtctccattcagaccgcaatggccaacggcactgccaagggatccggtgcaatcattgatactgagggccacatcatcaccaataaccacgtgatttccggggctcagcagattcaggtgacgcttgctaacggcaacatctattccgctcagctcgtcggcaccgacaccaccaccgaccttgccgtgatcaagctcgacaacccgccgagcggtctcaaggccgtcgaattcgccgattccgacaagctcgccgtcggcgagaacgtgatggctatcggtaacccgctcggctacgacgacaccgccaccaccggcatcgtctccgccctgaaccgcccggtgaccgtgaccgacgacaacaataacgagatcgtcaccaacgccgtccagatcgacgcggccatcaaccccggtaactcgggtggcccgaccttcaacgcggccggccaggtaatcggtatcaactcctcgattgcctctaccgcaacgtcctccgactccgccggatcgattggtatcggcttcgcgattccgtcgaacctcgtcaagcgcgttgccgatgagatcatcaaggatggctcggttaagcacgtcgccctcggcgtggtcatcaagtccgacacggttgaagccgacggtgtgacccgcggcggcgcgaccatcaccaagtcgagcgccactggttccgcggtcgtctccggcggcccggccgacaaggctggcctgaaggaaggcgacaccatcgtggccttcaatggcaacgcagtcaacaacaactactcgttgctgggcttcgtgcgcgccgcagctctcggcgataaagcgacgctgaccatcgtgcgcgacggtaagaccatggacgtcgacgtcacgctcgaccaagaggaatcttccgtaaacggttcgtccagctcgaactcgaacggcaacaaccaaaataaccagaacaaccaaaataaccagaacggcaacggccggaatggttacggcaatggcaacggcaacaacgatggcggcaccggtgatggcggcggcttctccgacccgttcggtctgtggtaaagctggttcagcgcgtcacacggcgttgagcggtaaccgttgaataccgtgtcagacaggcaaaggcccgtagcagtgagcaactcctgctgcgggcctttcgtatacgcgggaagcgtttggctgggtcggccggagcggcggcagatatcttgttccgtgggcttttgtatgcacgggaatcgttctggcaggaagtcagctgcaggcgcataagggctgcgagcccctcatatgcacgggaattcttggcggaatcgtaggaggggggattgatgccttctgactgatccgccaacgtagtttcgcagcccggcatgtcgcgttcaggccgctgatagggtaggccaagcgctgattcgggcaatgtctcgagcgatgcgcacaataattcaatacataactaaaaacgatttctttacgccgtgtatcggatggtcgcgcggagccgaaaggccctaagcaaagccgccggtgggttaacaaggcgtgaccgcagcgccgattgcgcgggccacgcttgccgcaatcgactccgtatacgagcgtaaggagcaatgatgagcggactcatcagattcttcaccaaaatcctcgacatctgccgacttgtgccgatgcttcccgttgttgttatcgccgcgatcccgctggcattgctgggcgattggtgcccatggggcaacgcaattgcgatgccggtgctgggtagtcctggtgtaggccaatggctgataatcgcgctggtggcaatcattgtgattgacacagtgcgtggtatgattgacgatttgcgccacggacaagtcggcgtcgatttgctggccgtagtggcgattctttccaccgttgccgtccgcgagtactgggcaagctgggcggtcatgctgatgattacgtccggcgaggccattgaggaatacgcgcaggccaaggccgagcacagtttgaccgcattgatgcaggcagcaccgcaaaccgcgcacgtcgtcaacttgcctggcgtggggtgtggggatgccgccgatgaggacgattcgtccgatggcttccggcgtgtaggctcggttccggcgacgtcctcccctcagtcgacttcgccgacagctccccttggagagaggaaccaagtaccgccgtcgaggggagctgactcgcggagcgagactgaggggagctggtcggctgaggccgccacgcaccgcttcgacacggtgccggtcgagcaggtgaagctcggcgatgtgctcatggtgttgccgggcgaaaccgtgccggtcgacggcgaactgctttccggctcggccacgctcgatctgagcaacatcaatggcgagccggtgccgcgcgaggtgttcgccggtgcccgagtgatgtctggcgcagtgaacggttccactgccttgaccatgcgcgccacccaggtggccgccgattcccagtaccagcacatcctcgaactcgtcgcttccgcacaggagtcccgtccggccgtggtgaaaaccgctgatcgcctggctgtgccgttcaccgtgttgtctttggcgatcgccggcattgcgtgggctgtctccggcgtgccgacgcgattcgcccaggtgttggtactggccacgccctgcccgctgcttatcgctgcgcctgtggcgtacatcgccggtactggtcgacttgccgccgccggtgtgcttatcaaggcacaggatgtgctcgaaaacctcggccgcgtcactcaggtattcttcgacaaaaccggcacgctcaccgtcaagcagccgcaagtggtgcgcgttgagatgctgcccggggctaaaacccgtcttaatgaggatcatgtgctgatgatggccggcgttgtggaaagctattccgtgcacatcctgtcgaagggcatcgccaaggccggtgccgacgcgatggcccgtctacgtcagcggttcgcggacggccagcgtcgctgtcccgagcctgaggcgagttggcccggccatggccgtgaatatccggttgtcaaggacattaatgaggactccggcaagggcgtgtccggcaaggtgaacggccatgccgtccgcgtcgggcgactgtcgttcgctgcggccggcgatgacggcttcttgactgccgaggtagcgggtgtaagccgggcggatggcccacggcaggaggcggccgacctcctcagcccgcttcacggacagtcccctctgggcggggatactgaggccggatctggccgcacgattgccgggaacactaaggaaaaggaaacgctgcgtacgcgattcggtatgctacagccggatgaaatggcctcctacgtgtccgttgacgggcaactgatcgcccgcatcgtgctgcgagatgtacctcgcgccaacaccaaaaccgcgctcgccaatctgcacgaactgggtgttaccaagctcgccatgcttaccggcgataagcgcgcctcggccgaaatcatcgcggacgaagtcggcattgacgaggtccacgccgagctgttccccgaagacaaggttgccgccgtcaaggctgccacggaggcaagcgccgcgccggccgggcgcgcgaatcacgccgccagccctgtgtccgatgccgtagatggcatccggtccgatggttctcaaccgtcgcgttctcgatgcagccgcgccgccgcaatccgcaagccggtcacgatgatggtcggcgacggcgtgaacgatgccccggtacttgccgtcgccgatatcggcgtggccatgaccgacggcacttccactgctgcttccgaaagcgcccaagtggtcattatgaatgacgatattgccgctgtgccgcgcgctatcgccattgcacgccgtaccaagcgcgtgatgctgcaggccgtgatcgctggtctcgtactcgccaccatcggcatgattgccgccgccttcaacctcattccagtggtcgtcggcgctttcctccaagaggccatcgacgtggtcagcatcctttgggccctcactgccctcatcgaccgcgactaggcggggtatctcctcgactgagtcgcggttttgccccactgacggtctgtaagcggggcgattctgtgggttaataggggttttgctccactgacaggctgtaagtgaggtaattttgcggtctactcgtggttttgcttcgctggtggggttcagcggggtgcttcggctggttagtcgcggttttgctccgctgatgggctgtaagcggagcaatttctcgggttactcgcgattttgctccgctggcggtctgtgagtggggcaatttcttgatcgactcgtggttttgctccgctggcgtgaggctggcagagggtatcaggcacaggattcccaccactcgcccctgttgcaacggaaggctttgcgataacctgtaacgcgtgactgaatctgagaacactgaacttcgtattgctgtaattggcgctggtccggccggcgtctactcatccgatatcttcctgcgccagctcaagaaactcggcgaggaactcggcctcggcaccaaggcccgcatcgacctgttcgaaaagctgccggtaccgttcggtctggtgcgttacggcgtggcccccgaccacccgtccatcaagttcatcgcctccgcactcgagaagacgcttgataacccggacatccacctctactgcgacgtggaattcggcaaagacgtgacccttgatgatttgcttgcccgctacgatgccgtgctgttcgccaccggcgcagtcaaggacaagccgctgaacctgcccggggccgacctcgatggcgtatacggcgcggccaagttcgtcgaatggtatgacggctaccccaccggcgcccgcgagtggccgcttacggccgagaacgtcgctgtgatcggtggcggcaacgtggccatggatgtggctcgcgagctcatgcgcaacgccgacgacctcaaggccaagaccgatatcccggacaatgtctacgagggcatcgacaacaacaaggcgaaaaccctccacctgttcatccgccgcggtgtggcccaggccaagttcagcgtgcaggagctgcgcgagatggagaagttgcccggcgtgcagctcatcatcaatgaggacgacttcgatttggacgacgagaccatcgaggtggccggcaaggacaagctcacccgccagatggtcgaggagctgttcgccatccgcgagatggccgaggacatggaagatgacggcgacgtcgacttcgaaggcaatccggccgaccgcaagtactacgtgcacttcaactccgcacccacggaaatcctcggcgaggacggcaaggtcaaggccatccgcgtggaacgcaccgaaaccggggccgacggcaagatgagccacaccggcgagttcaccgactacccggttgaggccgtctaccacgccatcggctacaagccggccgaggctcccggcattacttacgacgagcacggcgctcacctggccaacgccaatggcgatggccgcatcaccaccgaagcggacggcggcgaagtgcgcgaccgtctgtacgccactggctgggccaagcgcggcccggtgggcctgatcggctccaccaagtccgacgcacttgccatcgtgaccaacatgcttgaggatctggccaaggccgccgaaggtggtcgcgtggccgaggatcgcgaccccgaatccatcgaccaactgctggaaagccgcggcgtccgcccgattaacttcgccggctggaagaaggtcgacgccttcgagcgcgccgaaggcgccaaggaaggccgcgaacacaagaaggtcatcgagcccgaccagatgcgtgagctcgctctggcctgattgactatcagctcatcgcatcggcaactgcaccagcagctacgcaatcggcgcgattgatacatcgataaataaggacgccggttatacgccggcgtccttatttatataaaagccagtgtcgtgccagtcgagcaggccgatgggccaaacgatccaagcagccaaagcagtccaaacaagcaaagcgtctcgatcagaccaatcggtaaagcggtaaaacaggccaagcaaccgcactgtcaagcatcgtcaatcccatgtaaacaggctattccgatccccgccaaccgcaccgtaagcaccgccaacccccatccgattcacccctcggcgcacatccagccaatattcaggcagtgattttagtgtgagcctcatggatgccaaagtacgggtgcacggccatttcaacggcctgaagactacgctgctgttcgccttgatgtgggccatcatcatgctgatatggtgggccacgggcggcaggcagcagacgctgggcatctacgtcattatcgggttggccaccacgttcggctcatactggttctccgacaaactcgccatcgcatccatgggagccagggaggtcagcgagcaggaagcccccgaaatctaccagatcgtgcgcgagctgagtgccaaggccggcaagccgatgcctcgcatctacatcgcgcccaccatgagtccgaacgccttcgccaccggccgcaacgaacgtcacgctgccgtatgctgcacgcagggcatcctgcaaattctgaacgcccgcgagttgcgcggcgtgctgggtcatgaactgatgcacgtgtacaaccgcgacattctgacctccgccatcgcctctgccatggccaccgtcatcacgtacctcggctattccctgatgtatttcggcggcggcaactcgcgcgacgaccgcgataattcaggcggtctcggcttgatcggcgtgctcctcagcgtgattctcgcgccgattgccgcatccctgattcagatggccatctcccgcacccgtgaatatgatgccgacgaggacggcagcctgctgactggagaccccgaagcgctggcctccgcgctcaacaagatctcctatggtgcccagaccacgcccatgcgcaaaacggccggcacccagtccgtctccgcgatgatgattgccaatccgttctccgcggtcggtttctccaaactgttctccacgcatccgccgactgatcagcgcatcgcacgcctgatgcaaatggccaatgaaatgaacggcactccggtggccgcatccacatattccacgcgcgcaattcactagtccagcacagaactcaaaccggcacatggcgcaaggtgccgcataggtgatacacttgcctctcgtgcgtggaagcgcacatgcggacgtagttcatcggtagaatgaaagcttcccaagctttagaggcgggttcgactcccgtcgtccgctccatcgattttccttgaaattccaacggttttccctcttttgagagcttattttcctgccgtatgaccgctatatgagaacaattcacgtcgtccgcgtatcgtgatgggcgatgtgtgaacccaagaccgttgcaaccaatggccaaccaacgccaaccctcgaacgcaccccgcacgacatcttcgtcggtgccggactggcgctcgccggaggcgtcttctggggcgtcaacgccaccgtctccaaactcctgatgaacgactatcacgccgatccgctgtggatcgcctgcgtgcgcgagctattggccggtgtcatctttctggtttgcgcaggaatcttcacgcctgacaagttcatcaactcgcttaaggactaccgttcctacccgagactcctgctgtgcgcgttcttctgcgtgctcatggtgcaggtctcctacttgaaggccattgactggaccaattccggcacggccacagtgctgcagacgctcaatctgctggttgtactcgtattcgtatgtattatgggcaaacggctgcccggcaaacgcgaaagcatcggtgtggtactcgcttttgtgggcacggtgctcatcgccacaggcggcgatctcagccagctcagtctgccgctgcccggtctgctgtggggcctgaccgatgccgtatgcacgtcgttgcttgcgattctgcccatcgcattaatggccaaatggggcaacttcatggccaacggtgtcatgttcgttctctccggcctgatgctgctgccattcgtgcgcccgtggaccaccgcccccgcgttggactggttcggcatcggcctgatggcgttcaccgtggtgttcggcacattcggtgcctattggctatttctcggcggcacccagcgctgcggtgcaatgcgcgccaccatgctcggcaccagtgaacccgtaaccgccgctatcaccggtgtcctattcgccggcgcggtctttaccccgaccgatttggtcggcttcgccatgatcatcatcatggtgttcctcgtgagatagttcacagctcgcctggccccagaacctagtctggcgggcacaccccgagcgataatgaagccatgacaatcgcaacaccggaacgttatgccgaaatgctagacgccgcgcgacgcggcggctatgcttaccctgccatcaacgtgaccagctcgcagacgctgaacgccgcgctgaaggggttcgcggacgccgaatctgacggcatcatccaggtgtccgtcggcgcagccgcatacctttccggcatcggcgtcaacgaccgtgtcaccggatcgctggccttggccgcttttgcacacgaggtcgccgcgaagtacccgaacatcaccatcgccctgcacaccgatcactgcgccaagcagtatctggacgaatgggtgcgaccgctgctcgcacatgaggccgatcaggtggcgcacggccaggagcccacattccagtcgcatatgtgggacggctccaccgtgccgctcaaggaaaatctggacatcgccgaggagttgctcgccaagtcgcaggccgcgcacacggtgctggagatcgagatcggcgcggtcggcggcgaggaagacggccattccgccgaaatcgacgaacgcctctattccacgccagccgatggccttgaagtggcccgtcgccttggtttgggcgagcgtggccgatacatggccgccttcacgttcggcaatgtgcacggctcatacaagcctggtgtggtcaaactgcgcccggccctgcttggtgagattcaggcccgagtggcccgtgcggtggccgagggcgagctgcccagcgccgccggcatggtcgacttccccaacggcaagccgttcgagctggtgttccacggcggctccggttcccgtccggaagagattgcagaagccgtgagccatggcgtgatcaagatgaacatcgacaccgacacgcaatactcgttcacgcgcccgattgccgaccatgtgttcgagaactatgacaaggtcctcaagatcgacggtgaagtgggcgaaaagaagttctacgatccgcgttcctggggccgcaaggccgaggaatccatgtccgcccgcgtggctgaggcatgcaagcaactcggctcggccggcaaagcactcagataacacccaaataaactgtcattcgccgtggcggcgccttggtatcggcccgcctcgcgcaacgcgcggcaaagacaccagaagcccgattgcgtgagatggccgcgccccgagtagagggtgtaaggtagtctgtttccggcggaatcgtgcgaatgcggaggtgcatcatgcctggaattgttcttattggtgcccagtggggcgatgagggtaaaggcaaggcgaccgatctgatcggtaccaaggtcgattatgtcgcacgcttcaacggcggcaacaacgcgggccatagcgtggtggtcggcgacgagtcgtacgccctgcatctgctgccctccggcatcatcaacccgaacctcaccccggtgatcggcaacggcgtggtcgtggatccggaggtgcttttcgaggagatcgacggcctggaatcccgcggcatcgactgctcgcatctgctggtgagcgaggccgcgcacatcatcgccccctaccatcgcaccctcgacaaggtgaccgaacgcttcctcggcaagcacaagatcggcaccaccggccgcggcatcggcccggcctacgcggataagatcaatcgcatcggcatccgcgtgcatgacctgttcaacgccgaccacctgcatgacaaggtggaggccagcctgcaccagaagaaccagatgctggtcaagctctacaaccgccgtgccatcgacgtggaccggaccaccgacgaactgctgaagctcggcgaacgcctgaagccgtatgtggccaacaccggcctgattctcaacaaggcgctcgacgaaggcaagaccgtgctgttcgaaggcgctcaggccaccatgctcgatgttgatcacggcacctacccgttcgtcacctcctccaatccgaccgccggcggcgcctgcaccggcaccggcgtgggccccaccaagatcacccgcgtgatcggcgttgccaaggcatacgtcacccgcgtgggcgaaggcccgttccccaccgagctgctcgacaagtccggcgaatggctgcgtcagcagggtcacgaatttggcgtgaccaccggtcgtccgcgtcgttgcggctggttcgatgccgtcgtcaaccgttacgcttcccaggtcaatggcctgactgacatcgtgctcaccaagcttgatgtgctcaccggcttgaaggagatcccgatctgcgtggcctatgacgtggacggcgagcgtcacgacgatatgccgaccgatcaggccgctttcgccgccgccaagccgatttacgagaccatgcccggctggaatgaggacatctccaactgccattccttcgacgacctgcccgccacctgccaggcctacgtcaagcgtttggaagagctgagcggctgccgtatctccgcgatcggcaccggtccgcagcgcgatcatgtcatccagatcaattcgctggtcgactgaccgtctgcaacgaatttcccggcttgactggtaacgacgcggcacatgatatccgccggctgattccgcgattcgaccacttgaagtggaagatggcggcggccggcatagtcattggtctggtttcaggattgctggttgtcgtataccgtctcggcatcgaatacggcacggatgcgtcccgttggatatatgcgcggattcgcgagaccccgtggctgattgcgccgtgggcggttgccgcggtggcggccgcgctagcaatcgcgtggatggtcggcaaggagccgatggctggtggcagcggcatcccgcagaccaacggcgtggtgatatgcggcttgaagatgcgttggcagacgattctgccagtccgtttcgtcggtggactgttgggcgcgttgtttggtctgtcgctcggccgtgaggggccgtccattcagattggtgcgtcgggcgcgcagtgtgtatcccaccgtttgcgcggccgccgccgtgaggacatgcaggagcattatctggtcaccgccggtgccgcggccggcttgtccgccgcgttcagcgcgccgctgtccggcatgatgttcgctttggaaggggtgcatcggagtttttcccctgcgattctgatgggcgccaccgccgcatcgctgaccgccgatttcgtctcaaaatactgtttcggtctgcgtccggttttggatttcggtgatatcggtcagctgtcgttggaagagtatgtgtggctgattccgttgggattggtggccggtttggttggttcgctgatgaaccgctcgttgcttggcttccagacgctgtactgcaaactgccggcatggagccgcccgatgattgcgattgcgatcgcgttgcctgtcggcatctggttgcccgatgtgctcggcggcggctcgaatctgattgataccgccgaacatgcgcgcgtcggcttgggaatgctgtgtctgctgttcgtggcgaagatgctgttcacatccacgagtttcggctcaggcgcgcctggcggtattttcatgccgattcttgcggtcggttcgttggccggcggcatctgcggtgaagtgttgcatcgattcggtaatctgccatccgacgcagtggcggtgtttgcggtgtgcgtgatgacgggcacgctcgccgcgtccgtgaaaacgccgatcacgtcgattctgttggctgtggagatgtctggaacgttgacgcacatgctgccggtcgcggccgtcgctttcatcgcgctgttggtgtccgatttgctgcgcaccaaaccgatctatggggagttgctggagcgatatgtgcgtgcgcaaggcatgcagatggcgatcgcaagccatgtgggcagcggcattatggaactgccattggaaatgggggcgattgcggacggcaagcgggtgcgtgacgtgcgttggccgtctgggtgtctgatcatcggcctgcgtcgcggcgaaagcgagatcgtgccgcgcggtgatacacggctgcgtgccggcgactatctggtggtgctgttcagtggcgaggaggagcgcgaggtgcgacctgcgatgcggcggctgtgtgatgcccggcttgactgagcctggctgaattcggctggactctggatgtacgaatctgcggaatcggacatccagggtgcatacgttggcgctccgtgtaaactcatatgcgttaggaaggcagcaatcgcggcccagctcgttgttgcacggcctatgggcgggaacaacgctgtccgcggaaggccagtacagggggagcgcaatggaatcgcaagaacaatcgccgggagacgtggtgactgcgggtgaggactcgcatcctatcacgcaggcaatcgacgctgttgaggtgacgcatgctggtgcaaccgcgcccgccgctaacaccatggatccgcctacgattcccctggcaccgatgaaacgtatgcaggcgcggttcaatccgctcgccgacggactgatgtatgttgtggtgttcgtcggtggatttgttggagtcggctgtcggcatgcgttggatatgcttctgccgtcggttagcgggacgccgttcgttgtgggcacgtttgtgtcgaatatggtcgcctgcttcctgttcgcgatgctgaccgaattcatggcgaccgcttcgtggctgcgtcgccgggtgcggcaggttgtcagccgtggtgttgggctcggcttgctcggtgggctttcgacgatgtccggcgtgatgctggaaacgatggaaggtctgcacgagcggcatatcgccagtgcgcttggctatcttgcgggaaattttgcaggcggtttgctcactgccgccgccggcgtggttctgatgcaggcactgctgtcacggagtactcgaaagcgggttcggggtgcgttttcagctgtttccgtgtccggttctgccgaatcggacacgcagggcgtacgccatgtgaaagtggccgacgtggcgcgttctgccgcgcaggccgcaatggaagccgcgcaggcggcgcagcaggccgcgcagacggcccagcagattgcacagacgggacaggttccgcgagtcgaaacgccaaccgtgccgccgactgccatccagcctatgcagacaggccacgttccgcagattcctccgctggtcgttcctcagctggcacagtcatcgcagccgttgttgcgcgagccggatactccagacttggggcagctgcccgagccgattcagcagtcgcagccgatccagcagccggccaacccgcttccgcccagcttcgagcccaaaccgatcactgcggagatttcgcttgtcgccgacccggctaccggggaggtgcgctgatgatgtggatgatctgtctgttcggcggtctgggcgccatggcccgttacgtgctcgacgtgtcaattcaacgaggctggaaccgcgagaatcggagaacgaaccgcagcttcccgctatccacgctcgtcatcaacggcgtcgcctcgctatgcgcaggcatcgccatgatgtcctactattcgcaatcggtggatatggacacggtcatgatgttcgttgtcggatttctcggtggtttctcgacattctccacggcgctcaacgaagtggtttcgttgattcgccagcgtcgttttacgctggctctgggctatggaatagcaaccgtcgcggtgcctctcatttgcgtggccaccggtttcggcattgcgctgcttgccaatccggcgtaattttcacgttacacggacggtcgctgagcaacgtgaaagaaatctgagcgcaactgccatcaaggccgccagtccggatgcaacgctggtgattgcattcgaccagaccaagccgctgctgaaggccttcgcctccgcgggagtcgacactaagaagctgtatttcgttgccggactgtcgaacaggttcgagagaatgtaaatgaatgtaatgttagcggtaagcacgtgagaatacggcgatagaacagtgatgacggggaagatgcgatcatggtcggcatgcgcgatgtggcgaagaaggccggggtgtctctgagcaccgtctcgttggtggtgaacggcaacgggtacgtgtctgatgacatgcgtgaacgtgtgcgcaaagccatgcaactgctcaattatgtgccgaacgagcttgcccgcaatctgtatcatgatcgtacgaatctggtcggcgtcatcgtgcccaccatccgccacccgttctttgcaacgtttaccgcacatctgcagcatgcgctcgccgcgcaaggattacgcactatgttgtgctctaccgcagatgaggcggacggcgaaatccagtatgtcgacatgttgcgtcggcacatgatggacggcatcgtcatgtgtgcgcacacttcgcatcccggcgattattggacgtcgattcatcgcccgatcgtcgcgttcgaccgtgtgcttggagacggtatttcgtcgattggatccgaccacgagcagggtgggcgattgattgcgcagatgctgatccgcaatggtgccaaacatgtggtgatgattggcggtccgcgagatcaattcttcgatttggctgcgcgcggagaagtcgaggaaggaccgttcgatttgggaaagaccacgttcccgacggtgcgctattacctcacgttggaacaggaattggcctccgcaggcgtgaaatacgagtacgttgaagctggcgaagtgatggattttgccggctagcatcgtgcggtcagcaatgcgctcgacaaggtgacgaccgacggcgtcgatgccgtggtcagttccgatattggcgcgtcgttctgcgtgcgcgaagcgttgagccgcggaattgccattcctgacgagctgcagatcgttgcctacgatggtacgtatttgactgatttggccggcatgaagctgaccgcggtcgcgcaggatttctcggcgatcgcacagtcgacggccgaccatatcgtgcaggctattgccaatgaggaagtggccgcggctaacgcttcacgcagggacatccccaagccgttcgagccgaacgtgcttattcccatgacgctggtgccaggcgataccacgcgttgatgctgcgcgtcttcatgcgtgtgcccggtgtggatctcatcgatttcagcggcgtccacaaccagcggatgcccgtcgatggtcgtgctcatcatccgacttgtgcacatgtgtccgattctgccgaatcggacgtctgagttccgaaaaaagtgttctgtgtgtccgattccggagaatcggtcatgtgtgatgtgtgagatgtttggatgtccgattttgcagaaacggacacattggggtcggacaggctgggttgtgtagaacaccgcatcaaaccggttcgacacgcgcattttgcggtattactggacatcaacgtccctttcgaggtaatatcaaaccggttcgatacgtataagtatgtaaaagcacgcatacactgcgtacacattgcacctgcatccatgaaccaagggaggtcccatgaaaaacaaagtgcagctcatcgcttacgccgatcgtctcggcgatggtactcttagctcgatgaccgacatcctgcgcacccgcttcgacggcgtgtatgacggcgtccatgtcctgccgttcttcactccgttcgatggtgcggacgctggcttcgacccgatcgaccacaccaaggtcgacccgcgcctcggatcgtgggacgacgtcgctgaactttccaagacccacggcatcatggtcgatgccatcgtcaaccacatgagctgggaatccgcccaattccaagacgtgctgaagaacggcgagcactccgagtattacccgatgttcctgaccatgagttccgttttcccgaacggcgccaccgaagaggatctcgccggcatctaccgcccgcgcccgggcctgccgttcacccactacaagttcgccggcaagacccgtctggtatgggtcagcttcaccccacagcaggtggacatcgacactgactccgccaagggctgggagtacctgatgtccatctttgatcagatggcagccagccatgtgcgctacatccgtctcgacgccgtgggctacggcgccaaggaggccggcaccagctgcttcatgacccccaagacctttaagctcatctcacgcctacgcgaggaaggcgtcaagcgaggcctcgaaattctcattgaggtgcatagctactacaagaagcaggttgaaatcgcctccaaggtggaccgtgtctacgacttcgccctgcctccgctgctcctgcactcgctgttcaccggtcacgtggaacccgtggtccactggaccgaaatccgcccgaacaacgccgtcaccgtgctcgatacgcacgacggcatcggcgtgatcgacatcggctccgatcagctcgaccgcagcctcaagggcctcgtgcccgacgaggacgtcgataatctggtcaacaccatccacgccaacacccacggcgaatcccaggccgccaccggtgccgccgccagcaacctcgacctctatcaggtcaacagcacgtactactccgcgctcggctgcaacgaccagcactatctggccgcccgcgcggtccagttcttcctgcccggagtgccgcaggtctactacgtgggcgcgctcgccggtcgcaacgacatggaactgctgcgcaagaccaacaacggccgtgacatcaatcgccattactactccaccgccgaaatcgacgaaaacctcgagcgcccggtggtgaaggccctgaacgccctggccaagttccgcaacgaactgcctgcattcaatggcgagttcagctacgaagccgacggcgacacatccatcaccttccgctggatcgctgccgacggcaagaccaaggccgccctcatcttcgagcccggccgcggactcggcacggataacaccactccggtcgccagcctcgcctggaccgatgccgccggtgaccacgagactgatgatctgctgagcaacccgccgattgccgatatcgactaaccgttggcccataaacgccactccgctgtgcgcgctccaagtagtgcgtccggcgtaagctgggtccatggaaaacaaaccgcccgcagtgcaccgaagctagtgcgctcgggcggttttgcatgtgacggggttgcgggtcatgctcagccggagctggccggtacctcccgccggtgatgagagcaaagaaagagcagcaacatgttggaaccgtacgtgcgcccgggtattgacgaccgcccggatctcgacaaggcattgagtcccgaagacaaggatgccgtggcccgactggccatcaaagatcgtcggcgtcctcccgaggcatccgccgatcagcccgaggcccaggccgtgcgtctggcggccgccggttcgtcggctgctgccgctgccgcggccagcgtggatgcccctgcgcctgatctgtcgtctgcatatctcgatatgcgcgatccgatggtcgccgccaatggtcagcgacccaccgctgttcaggtttcccgtcttaattggggctttttcgtggcttcgattctggtcggcgcaccttgggcggcgttgaacaccatcgccatgcccaacgccgtggcgcgtttgttcgactacgacaccgcttctgccatatcggtcaccatcaatccgtccaccggccgtccgctgcccgtcgccactgacttggtagtgcctctggccgtgctggtggtcgttggcgtggtggcctccatgttcgcgatgcccttggtctccgcgctgtccgaccgcacacgtattcctctgggccgccgtaccccgtggatggtggcgggtggcgtgctgtgcgcgctgatcacgctggttctgggacagaacacaggcctcgtagtgctgtgtttcttctgggcgctcatgcagtttgcctatgcgatgatttccgtgccgttggccagcgccatcagcgaacgggtgccggacaaattccgtccgtgcattgagcgctggcacggtatcggcgtgatgcttggccaagcgcttggtgtatgcatgggtgcgctcggcgtgatgttcgactccttcacgccgtttgcctacaccgccgtgctgtttgcggtttccggcatcctgaccgtgatcatgctgcccaaggagccttccagccaggagcagccacatcaacgattcgagtcgagccaggtgtttgaccagctgcgtccgccggcacatgcgcctgcattcgcccgtgtgttcgccgctcgcgtgtgcatgatgacgggcgttggactgaccggggtctttctgtggtatctcgtgcgcttttgggtgtatggcaaggctgtggtgttcacttccgcgccattgaccattcccgcgggcctcctcatcgccggcatggccgcggcaacgctcatcggtgctgcgctcgcgtcctgggccgctgggccgatctccgagaagatcgaggaacggaacatcgccaccactgcagtggtggcggcatcctgcctgctgtatgccatcggcgtggcggtggcatgggggctcggcgtctggtccaccggcacggcacgcgaaaacggcatgctgctcttcgcgctgatctccggattcgccttcggcgtctacgatgcgttaggccttgaactggtaatgaatgccctacccgacccgcgcaacgccggtcatgatcttggcatctatgcactggccaattcggtcggactggcgctcgccgccattatcggagccgtgctggtcagcgcatttgcgagcagcttcggctactacctgctgttcccctccgccatcgtcatggtgttcctcgccggaatcatcacgctctcttccaaggcagagtaacagcgcgataaaccggttcgagtacactggtcgtcagtaatccagctagtactcacgggggagcaaaccatggtcggtatgcgcgacgtagccaaaacggcaggagtgtcgctcagcaccgtttcgctggtggtcaataacaccggctatgtctcggacgatatgcgcgccaaagtcgaggccgcgatgcgccagctcaactatattcccaacgagctggcccgcaatctgtaccgcaatcgcaccaacaccatcggtgtgattatgccgactatcgcccacccgttcttcgccacgctcactgcgcatctgcagcgtgagttcgccgcgcgcgacctcaaaaccctattgtgttccatcgctgatgcagacaaaggcgagggtgaatatgtcgacatgctgcagcggcacatgatggacggcatcgtcatggcgtcccacaccgagcatccgggcggctactggacatccattcatcgtccgattgttgcttttgatcgcacgttgggcgagggtgttccggccgttcgatccaatcatgaacagggcggccggctgattgcccgtcagctcatcgattccggagcgcgtcatgtggtgctcgtcggtggtccgcgctcccagttcgcggaagccaccacgttccccacgattcgctatcatctcaccgttgaacggatgctggctgatgccggcattgcctgcgattacgtggaagccggcattgtggccgatatttgcgcacacgaggccaccgcccgtgccatctttgagagatattccgatgtcgatgccatcgtcggatcggatctggtggcatccgtggcgttgcaggaggcgctgcgccgaggaatttcagttccccgcgatctgcagatcatcgcctacgacggcaccttcatggccgagaccgccggcatgcgcctgaccgcggtgcggcaggatttccccgccgtcgccgccgccctcgcctcccgcatggactcccaaatcgccgccgataacggaaccacgagtgccgctgcagctgagggcgggaatgcagttgcggccaatggcggccagtctacttccgaagacatcatctccgtaaccctcatccccggagagactacccggtagctgtatcgtggctttccccctcctcccgatgagaggagctgtctcaccacgacggaagccgtgacgttctccatcgtggcttcctctccgagggggagctgtcgccgtaggcgactgaggggagttcggcagaactacttggtaaccgatttgcggtgcaatcttgtcagtatttggcgggttaacttcgctggggaagcggccggcgaagccaaactgccagttactggtggttttgctccgctggtgcgttgttagcggtgcttctttaccagctcttggcgggatagctccgctgaggagctgtcagcggtgcaaaacttccagttattggtagtctggcctcattgagtattagtaagcggtgtagagctgccagctactggtggttttgccccgctgaggggttgtggatggtgcggagcccccatgtactggtggttttgccccgctgaggagctgtcagtggcacgaagtttccagttactggtggttttgcgtcgttgaggggtgctgagcaacgcttttatgccaattgctggcgattttgcgccgcacagggcatacatgccgtccacaatgtgaacccttgctggattggtgagatgaccgaacctatgtttacattccagttcgggtcgaacggcccgagaagataccgaaaggaggccacgcgatgactggattcaatgcttctgcgtctgtatccgcacgaattattagcccgtcttcgctggcggactaattcggcactgatgcttgaagccccgtcaacgaaggcagggccaatcaagctgacacaatcggcacggccctgcatgatgcggggctttttttgttgcgctcacaaggcttacggcaaaatcccgcagacggaaacggtagcgacggtactcggcaacaacagcaacagaacagcaaacctcccgcaggtgtcaatcacctgccgatgagagtgaacagagaacacacaggagttaccaatgactgcagcagtcgaagagactggcctgggacaggcggccagtaaggccactgccatggttcgcgattcggtcaagaccgtgatcgctgcatcgatggttggaaccgccatcgaattctacgatttctacgcctacggcactgccgcggcaaactacttcccgcacatcttcttctccgacaaggccaacccgaccgtcgccctgctgatgagcttgctgaccttcgccatcgccttcattgcccgcccattgggctcgctggtgttcggtcacttcggtgaccgtatgggccgcaagactacgctggtcgtcagcctcatgaccatgggtgtcggcacgttcctcatcggctgcctgcccacctatgaccaggtcggcgtcgcagcagtcgccatcctctgcctgctgcgcttcatccagggcatcggcctgggcggcgaatggtccggtgcggcactggtcgccaccgagaacgcgcctgaagacaagcgcgcgctgtacggctccttcccggagcttggcgcaccgatcggcttcttcctgtccaacggcacctacttcgtgctcgagtccttcaatgaccagagcgcgatgctggcgtggggctggcgcgtgccgttcctgctgtccgccatcctcgtgattgtcggcctcgtggtccgcgttcacatggaggagaccccgatcttccgtatggcccaggagcagaagaaggtcgtcaagtccccgctgaccgaggtcttccgcaagtcctggcgtcaggtgctgcaggccaccttcctcgtggccgtgacctacacgctgttctacacgctcgccacttggtcccttgcttggggcaccaaggacaccgcgaacggcggcggcagcctcggcttcaccaaccaggaatacctgctcatgctcatgatctccatctgcgtgttcgccctgttcatcgtgctgtcctgcctgtacgcggacaagctcggccgtcgtcgcgtgctgaccttctcctcctgcgcactcgtggtgttcgccgtgctgttcccgttcctgctggacggacaggtcgtcggccagcacaacttcttcgccaacatggtgttcctgtgcgtcggcttcgccctgatgggtatcgccttcggcccgatcggcgccttcctgcctgagctgttcgacgccaacgtgcgctactccggctccggcatcggctacaacctggccgccatcgtcggcgcggccttcgtgccgaccatcgccacctggctcgcccacaactggggcgtccactccgtgggcctctacctcgccgtgatggccgtgtgctgcttggtctccgtgctcacctgcaaggagaccaaggacgttgactttactaagtaaagtcaacggctggtttcctacccctcactcagctatcgcttcgttcgggcgtcgcctacagacagcctggtgggctgttcgtgggcgaaggcgagccgagaggcgagcagacaggccgcggacggtagtccgtccataattgcggccgagctgttgcggagtgactgaggggagttcatcccccccccataactgaatatcgccaagttcacaacgtgaaaaatctcaattccacgaagtgaacccctgcgaggcttttccggtgcaacaggactaaacctgcatatcggaaaagcccacaaggaaagccacaacagaatatcgctcagcgaaaccccgcagagcacaagaaaatttcaaccccataaataaacaaataaaaggagcgccaaaaatggcagcaactatctggtacgagaaggacgccgatctgtccgtgttcgatggcaagaaggtggccatcctgggctacggttctcagggtcatgcccacgcgctgaacctgcgtgactccggtgtcgacgtggttgtcggcctgcgtccgtcctccaagtccgtcgagttcgccaaggagcagggccttgaggtcaagccggttggcgaggccgtcgctgaggctgacgttgttatgatccttctgcctgaccagtaccaggccaaggtctacgaggaagaagttgagccgaacctgaagccgggcgctgctctggccttcgctcacggcttcaacattcactacggctacatcaagccgtctgaggatcacccggtcttcatggtcgctccgaagggcccgggccacatcgttcgtcgtgagtacgccgccggccgtggcgtcccggtcgtcgtcgctgttgagcaggacccggacggcaagacctggccgctgtgcctggcttacgccaaggctctgggcgctctgcgtgcaggcgccatcaagaccaccttcactgaggagaccgagactgatctgttcggtgagcaggacgtcctcatgggcggcatcaaccacctgtgcgacctcggcttcgacgtgctgaccgaggctggctaccaaccggagatcgcctacttcgaggtcttccacgagctgaagatgctggtcgacctggctaacgagggcggcctgaacaaggctcgttggtcctgctctgacaccgctcagtacggcgactacacctccaccgtcatcaccgacgagaccaagaagcgcatgcagtaccagctcaagcgcattcaggacggctccttcgccaaggagttcatggacgaccaggctgctggcgccccgaagttcaagaagctgcaggaagagttctctcacccgcaccttgagactgttggcccgaagctgcgcgctatgttctcctggaacaacgccgaggccaaggacaaggatgaggctgagtccttcaacggcaagatcgctcgtacccaggttcagtgattgccgcccctaaaggggatttaagctagcaaaccgccgttcccgcccatacgggagcggcggttttgtgttgttgcgcgcggcgaatcattctcaataacaactatgcgctgatttcttgcaggcaaacgaacaccgaatatgcaagatcgttgatatctcagcctttccccatatgtgcgattgtgcgattctgttcaaaagggtgcagagttgttatcgagaatcgttctctgcacacggctgtccatactccaatagtggcctagctcacgttgtggactccagcggggctgcgacggcgttctcggtaggattgatttcggtttgaaggacacaatcctcgcaacacaggacttatctgcacaccgtagataccccggcgcccagtggcgccacaccccactactgaaaaggagtgccaataatggcagcacagatctggtatgagaacgacggcgatctttccgtcctcgaaggcaagaaagtcgcaatcatcggctacggctcccagggccatgcccacgcgctgaacctgcgcgattccggtgtcgacgtggtcgtcggcctgcgtccgacctccaagtcggttgatttcgccaaggagcagggcctcgaggtcaagtccgtggccgaggcttccgccgaagccgacgtgattatgattctggcccccgaccagtaccagcgcaccatctgggccaacgacatcgagcccaacatcaagccgggtgccgccgtcgccttcgctcacggcttcaacattcactacggctacatcaagcccaccgaggatcacccggtgttcatggttgccccgaagggcccgggccacatcgttcgtcgtgagtacgctgctggccgtggcgtcccggtcgtcgtggccgtcgagcaggacccgcgcggtgacggctgggccctgactctcgcctacgccaaggccctcggtgctctgcgcgccggcgccattaagaccaccttcaaggaagagaccgagaccgatctcttcggtgagcagaacgtgctcatgggtggcgtgaacaaactcgtcgagatgggcttcgaggtcctcaccgacgccggctaccagccggagattgcctacttcgaggtctgccacgagctcaagatgctcgttgacctgatgaacgaaggtggtctgaacaaggctcgttggtcctgctcggacaccgcccagtacggcgactacaccaacaccgtcatcaacgaggattgccgcaagcgcatggaataccacctgcagcgcatccaggacggctccttcgccaaggagttcatcgatgaccaggatgccggcgccccgcacttcaaggaactgcaggagaagtactccaacgagcgtatcgagaccgtcggcccgaagctgcgcgccatgttctcctggaacaaggacggcgtcaaggacgccgacgaggccaactccttcaccggcaagatcgcccgcgcccaggttcagtgattcttccttggctcccctcgggtgaggtgcgcacggacagcgagccggcaatcgcagccttcaggctgtccgtgtttgcagtacgctggcgcgtaagcgcctgagggtggtccccagtgcataccaaaaggccgccgctccgattcattcggaacggcggcctttcgcatggtcccaccatatagtcaaacctccaccacgtagtaaaatccccacgacgtagcaaactacccaccacgtggtgacgcaaaacggctttattccgcggaatacaaaattacgctgacatcgtggtagaagattcatcgcgtggtgggcagttcatcgcgtggtgggatagacagttgatatacgccggctatcaaatcaatgatgtcttgctgtgttccccgtatgccgagctgcttcatcggaagcgtttcatgagatatttccccaagaaaatcagcgagatcatggtaggcctcgtcgttgagagacacgcgatcctttggagcaagtagttgagccaaacggaatacatcatatttatgcttcttgagatcttttccgtctacgtgctcgccatgttgttctcgggcgttgagatccaaccatgctttcgccttgaaaggaatgagatatttctcgttaagcacgctgatgccttgtattgattcgcggccttgctgcagtagccgatagtagctgtcgttcagcatgatggctgacaggctggaaacgtcgtttgcaatatgcaatggcgtcaggaacgagttcggcacaatagggaagtcagggtgacgtgaaaatagctcgatcatagtgggatacccgtacgtactggggtgcatgaaacggtacaggtgaggctgtgcggagttcttcgtgatagaggtgtatccgccatcgcgaatgaaagaccacaatcgttgtgcaaactcgcgaagatgtccctcggcaatcagcaccatgtcaatatctttggtggctcggaagtccaggtcgttgtcggtcatgatgatgtcacaagcggtgccgccgatgattacgtaagaatcttcgtagccggcaaaggccgttctgatgagctgcaggccttgtgtcatattgtcgctcctgagaaagtattgcggatggattcttgtatggcgtcttccaaacgttcgtcggcaatctcgccaagagtcagggccgtggaaatggggtcggcaaggtagtcttcctgcgtatattgagcaagtaggcggggatcgtacctccacagctccagaatatatgcattatctggcaccttttccaaagcggggtcgataatgcatagttccttgttgtgctgcttgagccaatgacgttcaacggcatagattcgcagttttggggtggccagttgcgtcctgcgcgaaagagcaaattcgccggccggaatcagctcgtcggcaatcatctggcgattgcgattcgtgacggtatatttgctgaatattggtgacttcaggagatgccaagatgatttcagtaaatcaagtcggctggtctgccttgaagtcagtagttcgacgctattgctgcggccttgcttggtgcggtgcacgaatgccagctgttctaacagcgtcacggcaacgctgacctgagcttcggtaaactgaagcgctcgggcaatatctgattggactttgctctcgttggagtagagcaaatacagccagaccagctgtgttgcgggggagaagggtcgcacctcgatatcctgtgcgttctccagcggccgcgaggagatgcgctgggtgaacaccatgcccagtgaagggatatacagttgggtaccgggcacgatgaaaggaacgtgattctgaatcagggcttttcgctggtatgcagaaagccggggaaactgaaagacaatgggcagatccgtccgctgctcaagcctgctggcgtcggcggtgacgcgtgtgatgctgaatgggtgagcctctccgctcgcgattagcatgctcgtgttgtcgatggtgagtttgctgaatgtccgtccgttggtcagaaatagcggcagtgaggcagtgccatcccaagaagtgatttggcagggcagaccaagtgtctcgcgaatgtaatgctcggcatccatgtcgacctcaatccttaacgaaaatctgtaagattcacatctcttgttaagtatatagaatattattaagtatttcggggttggcatgtcgcgaatggaaagaaagggcagtcatccccgaaatggagacagcttagccgggaaaaaggacgacgccagcatccggagaagatggatgactggcgtcgggtaagctcgcaaaagcactactgaacaacccacgcagaagtgtcggtggggagctggccttcgggtgtcagcgggccggacgccagcaccacggagccattgggcagcgcgaccggagcattgccgaagttggtgattgaggtgaacacccgcccgccaaccgccgcgcgggtgtacgccaccacatcgtcgcccatgtccacttgctcggccgtggtgtcgcgcgtggcagtcagcgactcctggcgaatcgccagtgcggcgcgatacagcgcgagcatcgagtccgggtcggcttgctccacgtccaccgcgtaatccttgaaccacagcggttgcggcaggtgcgggtcggcggccggcgtcacgccctcagcgcgcgtagccggcgagaagccgaaggaagcgcccgtgccgaactggccggcggcgcacagcggcacatggttctcgccggtaccgtcatcggccggagtcggacggctgaaatcggccaaggccggctcatcggcggcggtccacggcagcggcacgcggcagccgtctcggcccttgtccatcgtggcctgagcggtgtggaaagcggtcggatcttccagtcgatcccacggaatatcggccacttcaaacaggcccagctcctcgccctgatagatataggcggcgccgggcaggccgagctccatcaaagcggcggcgcgggcgcggcgggtgccaagctcgcgatcctcgggatacgtggtgccgttgcgcagcagccagtcgtgcggcagctggtggtagggcgcgcccttgacctgcggcaggccgtagcgggaggggctgcgcggcacatcgtgattgttcatcacccacgtggtggtggagcctccggtttcggcggcggccttgagacccgcgtcgatggcttcgcggaactcgtcggcataccagctggcttgggcgaaatcgaagttgaacgactgccccaactcgtccatcgaggcatacaggtgctggtgctcgggcaccacccacgcctcggccacggcaaagcgcggcgggtcgtactcgttgaacaccttgcgccattcgcggtagatgtcgtgcacttcgcggcggtcgaacagcgggtggctgaagtcgtggttcagcacgccgaccacgctgtattcgcggccgagctccttcagcggcttggattcaaggtctttggccagaccgtgcgccacgtcgatgcggaagccgtcggtgccgtggtcggaccagaagcgcagggttttcttgaattcctcgtggatgtccgggttcttccagttgacgtccggttgcgccttgtcgaacaggtgcagataccactggccgtcggccacgcgcgcccaggccgggccgccgaagaaggactgccagtcgttgggcggcagttcgccgtgctcgccgcggccgtcgcggaagatgtagcggtcgcgcgccggggagccgggctcggcggcgagggcttccttgaagaacacgtgcttgtcggcggtgtgattgggcacgatgtccacgatcaccttgatgccggcctcatgcgcggctttggccatggcgtcgaagtcgtccatggtgcccagtcgcgggtcgacgttgcggtagtcgatcacgtcgtagccgccgtccgccagatcggaggggtagaacggggagagccagatggcgtccacgccgaggttcttcaggtagtccattttctcggtaacgccggcgatgtcgccgatgccgtcgccgttaacgtccttgaagctgcgcgggtaaatctggtaaacgacggcctgcttccaccagtcgtcattgaggttgttggcggtcatgccgattcctttctgtgcgtgcgtgattgtgtggctcacgtggtgtgttgcgcccgattgctgtgggttagtggttattgggttcagcaggactcgaactgcaacggtgaacccatgcttgcctatcacattgatgacaacggtatcatgcaaatgatttatgcgaaagtacaagcatcggcgtttcgtgatggtaacgtggtcacgctcaccttagtccacacagaaaagacattgagggcagaggtgggacgcggtgcaccgtgcccaatcacccctgcgcaggcacgggcgcggcaggaggcgcagtggtctcacgcagcacgagcggcgcgtcgggctgaatgaacgccggttcaatcggcccgcccgcaatggcctccaatgccatgcgcccagcgtcggcacccatggcaaacggatcctgatgcatggtggttagccccacggcctgagacatttcaacgtcgtcaaatcccacaatcgaaatatcctgcggcacgcgtttgccgtactggcgcaggcgatacagcaccggcagcgccagctcatcgtcctcaaaacagaatgcagtggtgccggccggggcggtcagtaccgcgttcagagccgcgctggtctccgttgcgccgcggggcacctgaaggttggtcacggtgagctccgggtgcgcggcctgcgcgtccagcacgccctgcagtcgcgattcggcgctatagcgcatattggtttcggcgggagtgccgccaacgaatgcgatgccccgatgccccagcgcgatgaggtgttcgacggccgcgcgggtggcggtacgatcatcaatgcttacgccggagtcgaacccgtccgtggaggggatgttaatgccgatgatcggcacatgcatatgcttgaggcgctccacctcggccggctcgatgttgaacgagctgacgattaccgcatctgcattgcggcgcacgggcaggcccgcaaagaaatcgtgacgctcttcggcgttgcgcatggggtaggccacggtgtcatagccagcagggcgcagcaccgagtcgagccctgcaaagatgttcgcattgaaccaggtggtgatggtctcgctggccagcagcgcgatgcggaacgactggccggacttcagcgcggccgccgatcgggagatggaataatcgagcttttcggcggcggccattactttgtcacgagtttcagggagtaccaggtcgggcttggcgaaggttcgggacaccgtggatacggagacgccggcttcctttgccaccgcttgaatgcttgcttttgccatagtctttatcctctgctgctgtgcggatgcgtgttgccttgttcttgtgtatgttgcgctgcgccgtcggtgtgtgcgtttcgattgtcattgctatgacaacggtatcatgcccggtggcggcaatgccgtcgattgctcggcagcgggaatctgcttcgcgctgcgtgacgtgtcgaaagcggcggtgaggaaattcgccgacatggggtgtgttgtacatattgacatcgtttgcataatggcatgggacaattcgctgttgattcccgatggcggggtcctgacctctgccgttcccctttgaatagatggtaatgcatatgcatgcaatacgtagattcccccgtatggggggggtaaatgttttcgacacgccggcgtatagtgtcaacatattcaacgcatttcccctgttgctatgcgggaagagaacccatacccccttaattagagggcatgcgggttgaaataatgacaacctttgcagtatgatgttgtgcacacgagagaagtgatgcacgtcgaagtcgaccagtggtaagtggttgtttggagtcgacttcggggaggccaaaagccaacgtgtgcaaaaccgatttcgctaatgaagtgggcatattccgcaaagctgcgtgctcgctccacgacccgtgagcataacgagcgcgctgtagcgatacgccgatatcgacgcgttagacgacggttcgccggagacgaggaaagcatgatgatagcgagaagtttcggggggggggcagcgagattcaaggctgccgccgctgccctgcttgccgctgccgtgctggtgacgtcaactggctcactcgcattttccaataacaaacttgcctatgccgccgatctgagcgacggcgcattatgcactccgaccagccagtcgatgggcactgaagcaaatcccgcaactgagagggattccggcgttgccacttgggttggcggcgatatgtatgtcggtaagaagtccgacaacctgaccaatgctgacggtcctgacgcttcatattccgcagaagccgaaggcttgactgtggtcaacggcaagctcatgctgcatcctcggaagaattcgtggaacggccagggctttcgtttcggcgttgccggcttcggtacgcagtatcgtcccgccgaaggcagcaccgcattggtagttggcggcaataccggaaccgtaatggatagtgccacttccgccgctgatgtgaaagcgtggaataggcctggttttattgatggacattcgcacgtcggctcactctccggtagccagtcggatgtatgggacagggacggcacgtcgtcgattggcagctataacggtgcttccgtcaattggcagaaggacaagtccgggaatactcagaaccaagacgccggcaatctgaccaaagtttcagtcaaggctaccgatggcggtgccgccactgacaaagatttttcgaaggatacgttctatcaagggtatgtggtcgacgatatcgctagcccgctggccaagcaaaataataccggtacagtgagttcaagcatctccacgtggcctgggcttactcgccataagtacaactatctcgaggaaggccccaacgccgctagcggcatatcttacaccttcaaatacgacgacaccaccaagtacggtaccgaccgcggcattgcttccacaacgtcgtacaccaatcgcgaaaagctcatcacgttcaccggcacgaacaatgccagcatggaggtattcaatctcgatgccagcatgctcagcgacaccgatgagaatggcaccctctaccgtggcgtaggtttcgcctttgcgaacatcgccgacactgcatctgtcgtaatcaatgtgaccggcaacgccggtaatatctcgttccacaacggttggcagttctggtggaacggtgcggaaatctccgatggctactccaactacaacaacaccgacgagttgaagaagaagtcggctgcatacgacaaagcctcccagaagattctatggaacttcagcaataccgataacctcaccatctacggtggcgtggccaatgaggacggtacgaacaccaatgccgataaaattacccaggatgatgccgccgccgcgatgatgggcagcattatcgtcaggggcaacttcgaatcgcatgtttccaccaacggccgtgtgtacacgggtggcgacttctccatgtacaacccgtacaaggcatggacgttcaatcaagccggtgcgaacgatggtgattccgcctctgtgctcgacatggatcaggagcgtcacaacttcccgtggaacggttcgtacaccgagtcctgttccgctatcgcgtggcagaaggccgatgaaagcggcaccctgctcggtggcacgacgtgggctgtgtacggtaagtacgatgatgccgcaagcggaaagaacgcactgcttaccgtgcaggataacgcgttctacgacaaggactctgccgatggccggttcactgtggaaggtctgaagcccaacgcaacctactacatcaaggaagtctccgccggcaacgattaccagctgaatacgaacgtctattacgtagcgactggggactcatcggcaacgccggtcaatgtcacgcaatcggtgacaaagacggacggtgcttatacgtacggcagcgccgacatgaccgatggcaagatcgtcaacaaaaagaacggccatgaggtttcttggtcgaaggtcgatgccgacactaacaaggagcttgctggctctgagtggcagattcagcaggtgaaagatggcgcggccactaagagctggaaggtcacagacaacaccagcaaagcaaccggcgtaacggtcaatccgacctcagccacgttggattctaccaatgggtggaagaccgatttgaccgcagccgtcgatccgaaggatgccttgcaagaggttgcatggacgttcaccgataaagatggcaatgctgtcgattcgtccactgttgcggtattgacccgtacgggtaatctgaaaaccaccgtcaccggtatcagcagcattgataccactgtgtatgtgaaggcatgctcggtctccaatcctgaggtgtgcagcgccctggtcaccatcaaggtgaaagctatgagcgtcaaggatttcaccgtcaaggattcctcgaaccggactgttgagaacaattccaccatcaccgccgctgcagtggatagcacgctgacgttcaccgcttcctccactccggctgtcccgattacttgggagtcgagcaacaagagcgtggcaacggttacttccagcggcgagaacggtcagaaagcaaccgtgacgatgacgggattcggctctgcggtcatcaccgcgaaggccggcgacaagaaggtctcgttcacggtcaaggtgccgtctaccacggtgtacttcaagaagtcgttgatgaattggtcgaagtactacgtgtactacaacgctggcaacaataactggaagttcgtggagatgagccagagctgcggtgattatgtgtatgccatattgccgaagcagtcgcctggtacgaaatttttgttccacggtgacgatgaaaacacgagcaccaacaagtggtaccaggggtcgaataagagcgatttcaagttcacgggcaacgaagtgcaagtcgtgaaccagcataacgattcacaggtctccaccgctccggccggctgccctgcatccgccgcagctgcttcccagtcgaatgatgcggcggtgctcaacgagaacgccgtggtgacgcccgccgatgacccgcagcccagtgatgctgacggtgttgccgaaaacgctattgacgatggtgcaaaggccatttcctgcacggcagccgacggcgagaacggtcagcccggcgtgaagtgcgatatggacaccgcggccggcaaattcaaggtcggtggtctggatgccggcacgtaccggctccatgagaccacggctccggacggatacacgatcaataagaccctgtaccaattcacgattgatgccaatggcaacgtcacgtggaacggcggttgggccagcggcgaggcgactggcgccatcgatgaaaagctgaagcccggtgacaacaacgcaatctcggacacccctaccgaagtgacctggaacaaggtcgacaccaagggcggcaaacttgccggttcccagtggaagatcgttggtccaagccctgcaacggacgtgtactgcgtggccgacaacgtgacggttgatgccaatggcgccaccacgccggcaggcatcgagttcacaggctgcactggcgaaaagctgtccgatgccgcgaacaccgcagacgaggccggcgtcatcacggtcaggggcctgccggtcggcacgtacacgctaaccgagactaaggctccagacggctacgtggcaacaaccacggtctacacgcttaccatctctgccactgaagcttccaccgttgtggctcagaccgcgaccgataggcccacgacccgttctggcggcaatcgcgaagctgcggccaatgtccccaacgcttcggctccggtgaacatccaaatcccggtaaagaagagcgtgaaatacacgtcgtggccaaaggacagcaacggcaactacgtcaacttcaacttcaagattgaagcgaccaagtcgactgtggacgcgaaccccgccgcgccgatgcctgccgaatgcagtagcagcgacgcgaccaagaatgactgcaccatctccttggctccgaagtctgacgctgatgatctgtccaacgtcatagccaagttcggcaagatgacgttcaccgacgcgaacctcgcggcggcagctggcgacgccagcgactacgccaagacctacacctacaagatcaccgagattgtgccagattccgccgacgcggtggaaaacctgcgctactcgaaggcggagtaccaagtcgtagtcacggtcaagcaagccaaggattccagcggaaagctgtccggcttgtccgtctccgccacgatgacacgcatcaaggatgactccggcaatgccgaagctggcggcggaaagatgatcggcacatggtcatcaacgtccaccggcagcagcgccggaactgccgtcgaagcaaccttcgtgaacaccaaggtgctcaccggcctgcccaccacgggcgctgactggaccggacgcctagtgcttctggtcggcgacggattcatacttgctggcgttctcatcgccggcggatatcaactggccaaacgtcgacgggaggaggactccgactgatttttctccctgggccactcgattggccacctaccaacactcataactgaataaccaatattcaacacaatcttcttcttcatttcagagaaaggaagagagaaatgaacaccatattcaagagggtgatctccggagccgccgctctgggcatcgctgtcagcggtctagccataggcgtctccaccgcgtatgctgcggatccgaccaccggcagcatcaccatcaacaagtcagacgctggtcaggtggatcacagcttcgatggctggcacctggcatcgttgaccaacgtcaccaaggatagtactaacaagatcaacggcttcctcatcgataccgatgacaatatggtcagaaccattgttgccgcgatgactagcgatcaaaaggttgcatacgagaaagacgccaactactacagcaccgacaacgccgtcgccaacccgatggggtacttggtcgagaaggtatttaaggataaatctggcaaggcgctgagcgagctgaccagcccgtggggcggcgatagctccacgctgcgtgtgttcgccaagtcgctgtccaaggaacttgccaaggccggtgctcccactgccgataagaccggtgacagcgcactgaagaccggtgagaacaaggaactcaaacagggcctgtggttcctcaaggatgtcacgaccacggatgacaccaagggtaccaactccatcccgatcatcacgccgaccaccttcgatggcgccggcagctggggcacggtgacgctgaagaacaccaccccgaccatcgacaagaagctggttgattccaagggcgacggcacctacacgccgaacactcagccggattacgcagttggcgatgatgtctactatgagctgacctccaccgtgccggtctacaccggctacgacatcgattcgacgatgatggacgcaaccaagacccgtatcttcaagatcaatgacaccgccagcaaggcgctgaccgtgtccgccgacaccgtcatcgaatctgtcaagctgactcctgctcagggtacggccgtcactctggtcaaggacaaggactacaccgttaccgtcgctggctatggcgatgtgaacactcctgacaccgatgcctacaagggcggacacgtgaccactatcgaccttggtaagtacgtcaacaaggccaagggctctaagtccgctactgacggcatcctcgaaggcgccaccgtcaccgtgatcgtcaaggctaagctcaacaaggatgcgctgatttccgagcccggcaatctgcagaagaacccgaacaaggtcgacctcgaatactccaaccacccggaagaagtgaaccacgcccataaggttcctggcccggaagtgcccgtgtatgcctataagttcgacatcttgaagaccgataaggctggtaccactaagctgcccggcgctaagttcacgatcaaggcagtctccggtaccagcaagcacgacggcaagtacctcggttcttatggcaaggatggctggagctacctcgatagcgagccggcggtcgctgataccgatggtgtgttcaccactggcacagacggtaagatcaacgtctccggcctcgatgccggcacctacgaggtccatgagattgcgccgccggacggctacaccgcgattagtctgccgaagttccagttcaccatcacgccgaccgtcagcaatgaggtcgccggacgcaagaccatcaccgtcgtggcgctgagcctcgcgaagggcgccgacgtgcgtgccttgctgtcccaggacggcaagacgctgaacatctggaacgccaagaacatcaccgagctgccgaagaccggtggcgttggtctggccatgattgtggccgtcggcgcactgttcatcgcggcctccggtatcttcgccctccgcgctcgccgcaaggcctgagcggacacgcctagatagctaaggaacggcggccagcgcaccgcacttacccctcgcaaaccgccgttcctgctccgtctccggccgcatcgtcttgttcccgatcgatgcgcccggagacttttccatatttctttatttttgctgattctggagaaccgaatgatgcaaacaattatcatgaagtcccgtatccgcagggttttcttagctcttggggtagtgtcgtttattgagcggagatgagtccatccaatgcgaagcagcaccggagcaaaacaaagtggtacgcgcacacagtcgcgcgtgtttactgtgctgtcggtgctgtttttgctgatcgggtttgccgtcatcaccacgccgttcgtcatgcgcgccatcagcgaataccagcagaacgccaccgtgcagcagacacagcgcgaggtggatggctggccgtacccacaggcggagaaccagctcaaaaccgcccgcgagtacaacaagaaactcgtggctggcggccaggccgccatcggcgaggtcaaagatccttttgccagcaatgccggccagtccaccacttccggcgcggatgattcgatggccgccaaagatcaagaatatcagagtctgctcgacgccggccaaggcgtgatgggctccatccgcattcctaaaatcgacgtcaacctgcccatataccacggcacgagcgaagatgcgctcgccgtgggcacgggacacctttatggcacttcattgccggtcggcggcaaatccacacactctgtaatcaccggccatcgcggtttgccgaactcgttgctgttcactcgccttgatgagatgaagaagggtgattccttctacatcgaggtcatgggcaagacactcggctacaaggtcgaccgcattaccgtgatcaagcccgacgattccagcaaactgcgcatcaccaaaggcgaggatcgcgtaaccctcatgacctgtacgccttatggtgtcaattctcatcgcctactggtctccggtgtgcgtgccgaaatcccggaggaagtgcctgacccggacgatgtgcatggcatcaacaccacatggctggcactgggagccatagtgtttttggccatgctgctcgctttcatcgtcatattgatgcgacgtaagcaaaagcgcgatcgggaatttgccggcctcgcccggcacgccgcacgtccgacaaaataagcgccccgcgcgtctgcgattccgcgttgggaatatgaacggtttcgggtgccggactattcaaaaagcggccagattgtcgtaactcgatttcgaggggctgattgggcttgctccggacatctactttcacttcgaggggctggtgccaaagtagacacagctacaaaacggcaaaatgacgttgatgcaaagccgtttctacttccgtttcaacggatgaagagccccttgaagtggaagtagacctccggcaaacacgaaatcagcccctcgaagtcgatctaggcagtctctctgccgtcgggaagcgtttcagcgcttctcgcggcgcattacggcggacagggactgcacgcgcggcaggtcgaagacctcgtcggtgtgcactacgtgcccttcgccatctgccagcggcactcgccagttggaatactcgctggacgtgcccggctgattctgcgagcggcattcgcccacgccgtccaccagcgcagcctgcaacaacagcgacggcgtatcagtgagcatggcgtgcatggcttcaacgatctcctgcacatgaccttccacgtcatcggccacagcctgcgtgatataaccgccctccaccagtcggttcatcatcgcggtgcgctcggccatggccgaagcggcaaacacctccaccggctcgctgagcaaatgcagctcctcgcgcagtttcacatgctcgaagttcagatagccggcggttggcggcagatcgtgtgtggtgaccgatgccagtgcctgcttgcggtactcctgcggcgcgcggtagggatcgccggcgttcggcgaatcgtccacacggttgaaccactccacatcggtgccaagcacgccatgatcggccagaatgcggcgcacataatccggcacggtgcccaaatcctcgccgatcaccatgccgccggcgcgcgtggcctcgatggccagtacgccgagcatcgcctcgtggttgtacatcacgtaggcgccattgcgggcgccaagtccctgcggaatccaccacaggcggaacagtcccagcacgtgatcgatacgcaccgcgcccgcatgctcatacatggaatgcaccatttcgcggtacacctggtagccggtggcttccagataacgcgggttgaacggtggctggccccaatcctggccctgctggttgtagaagtccggcgggcagccgaccgtgacgccaccggaggcgaaacgctccgggttggcccacgcgtcagcgccgagcccgtgcacgccaacggccatatcctgcataaggccaagtgtcatgccatgatccaaggccgtgtgctgagcgtcgttcacctgctcggcggcgatccactgcagccagcggttgaactcgaacagatcatgatggtccttgaccagcgtctgcacggtcgggtcgtcgatggtcttctcgaagaaccagcggttctcgccccaaggtgcgccccacacctcgaagcacaggcaccaggtggcgaaggaattgaggtccgggccggccgtggccttgaaatactcgaactccagctcgcgcttgttgttgcggcccgcatcgaagatcaggcgcagggccgggcgcttggcctcccacgccgcgttgatatccatcggcgtggattcatcattgcgtgcggccaccgaggcatgcagtgcatccacctgggcgcgcacgtcatccggcagggtggcgtattcgggaatgtcttgtggacgaatgtacgtcacgttgaggaaccggcgcgattccggcagatacggcgaaggctcgagcggcggaatcggcgcaccggcgtgaatcggattgatgagcatgaagtcggccttggacttctcggcggcattcgccaaaagacgcttcagatcgccgtagtcgccgatgccccaggaatcatgggagcgtaccgaatacatttgcgtcatccagccccagcgctgatgctcctcgaccgccttcggcacggcgatgcgtgcgggggcggcgatgatggtcgccttgcctccgcgcccgtcaaccgtgacggtcagcgtgtggtaacccatcggcaggtcgggggcgatggcgagatccggctggccggagttgagattcggcagtagggagaagcggtcgaatgcggtgccgtcttccagcgtgatggcgacggtgatttccgcgtccgacgggcaattcagggtcaggcttgtcggcttgccggtgatggccacgatggtgggcggtagcaaacgtttgctgttttcggcctcaagttcggtcatggaacgttttatggcctcgtcgctggaggcatccacatcgagggccttgagcacggcgaccaatgcgtcatcgctgatttcggtgtaggtgccgagctggtcgatgaacgaggtcgcaagcccggatgctttggccaatttgatcagcggtcgagcaaggcgttcggcgctttcctttcgctgtgtggtgtctggtgcattggttgccgcttcattgctgcgcgcctcggtcataatagctccttgctgtgcgtccatgtactgctgttcgtttgcattgctgtttgagggccgctctacgttgaggatccggcaatctgacagaccaatgttgaacctgttctgctcttaccgtagctcatattgacaacgattgcaatagagcggtgagttgggccggtttggaggcgtcgggggcgccggcctgttggccacccccagtcggctttgccgacagcccccgccagcgggggcgaggctgagtgggtctctaaccgaggatggcgaatgactgggcggggagtgtcaaggtgcgaccggatacggtgggggagccgagggctagcagcattgatgcatcgggacggagttcgctcggcagttccacggtttcaatccctcgaccggggttcatggctatgagcaacggccgggccgtagcgccatttcggtctgagacatcatcgcgagtggcggcgggggcaggggccgagctggaatccgcggtcgtgcgtgggtgggtggacgcgtgaccatccgcaggagtgcgtatgtaggcaaacgcgcggccatccactggcgctgccaccacgtcgaatcgggcatcggaagccaatgcgggctgctcggtgcgcaatgccagcacctcgcgaacccagttgaacagtgaatcctcgcgtgcggcttcgctggcaacagtcggcgcatcggcggccgaatcgaccggcagatataacgactcggatggtgcgcaggagaagccaagattcggcttatcggcatcccactgcatcggcgtgcgactgccggtgcgcacatagccgccctccttggtgggcagcggccggtatcgcatgccgatttcgtcgccgtagtaaaggaacgggcagccgggcatggtcagcagcatgccgtacgccaccttgagctcgcgctcggtaagcctctgtgccacgcgcaatgtgtcgtgattgcacgtgatgaggttgaaggtgccgctggctcgttcgcagtcgtgcagctgcggcagatattgttcgaggaacggtgcgatagaagtgccggaatcggcgttgaagtaactggcgtcactctcgtggtccagcggcgtatccgtattacgcagcagcatgttgtacccgttcggatggccgtccccgcgccagtcgaggtagaaatccatgtcgaagccggcctgcatcgactcataggggcgcccccattcggcaacgaatgctgcctcggggaattcggggcggattctcgagaagatgtattgccaggtgcggatggtgaaaggcttgccgtcgtcgtcgtgtttgacgaggctgtcggccatgtccacgcggaagccgtctgccccgcgggagagccagaagcgcatgacgtcgagcatcgcctcgcaggtggccagtgcttcggggccgagtgcgggcttctgccatgggtgtttggggtgggcgaagccgtagttgagggcgggctggcatttgaagaagttgatgatgtaggtgccgtcgcgctcggtttcgccgccaatgaagggcaggtcgtcgccgcgggagatccacgagtcggtccagatgtagcggtcggagacggattcttgggtgtcggattcctggaccaccctccggattgtttcacaatccgacccccgccggcgggggtcgaagagcgaagcgattcggggggtggtttgtccgacgggggtaacactctcgacggggatagttcgatcggcatcaacgggggtaacgcgctcagtagggtcaggacgtgagctggcctggaaccaagggtgctcctcgctggtgtggccggggaccaagtcgagcagcacgtgcatgccgagcgtgtgggcgtgctcgaacagggcggtcaggtcatcgttggtgccgtagcgcggtgcgaccttcgtgtagtcgcgcacatcatatccggcatctttgaacggtgaatcgaagcagggattgatccatagtgcgttgcagcccaggtcatggatatagccaagtcgttcggtcagtccgcgaagatcaccgatgccgtcgccgttcgagtcggcgaagctttgggggtaaacctcgtaaaaacgggcggaactcagccaggatggacggggggatgcttcggcgtgtcgtacgcggcctgacatggaaactcctttgtttatgcgggttcagggctatgcctatcgattgcaataataccagcaaaaacgaaactgcatacgtatgcaaaatgagtgttatactaaaaaccaacgctgttcagcaatgttgcaaacgtcaaacatttcaagggctaaccacgataatgcgagcgtatgcatcattcgttttcctatagaactgaaaacgtgtgcatcggaatcatcggattaggacaccgaatcaggaaaggacagatcaatgaagatcgattgggagaaggctatcggcctcactgctgccgcagctatgttgctgcccctcgccgcatgtggtggctccaacaatgccggcgacgcaaagtccggcggcactgaagatgtgaccctgagcgtgtgggccccgcaggaggaccaggacggcggcaacgactcctggctgagccaggtcgaagccaacttcgagaaggagcaccccgagtacaagatcacttggaagaacgacgtgctctccgagggcgacgctgccacccaggtccagaccgatccgaccgccgccgcggacgtctacatgttcgcctccgaccagctcggcgccttgatgaaggcccagggcatcggcgagctcggctccgacgccgagaagcaggtcaaggaacagaacggcgacctggaagtcgcctccgtgaccggctccgacggcaagatgtacggcgttccctacaccgacaacacctggttcatgtactacgacaagtccaccttctccgaggatgacatcaagagcctcgacactatggtctccaaggctgcggtcgccttcccgctcaacgattcctggtacatcggtggcttctacgatggcctgaccctcttcggtgaggacggcaccgacccggatgccggcatggtgttcccgaaggacgccggcgacatcaccaagtatctggtcgaccttgccgccaacccgaacttccacaacagcgccgacaactccggcctgtccgagatgcaggccggcaccgtcaaggccttcttctccggttcctggtccgctgccgacatcaaggaagccctcggcgacaacatgggcgtcgcccagctgccgaccttcaccgtgaacggtacaccgaagcagatgaagtccttcgccgccaccaaggccgccgcctacaacccgaacgccaagaacccgaaggccgccgcccagttcgccgcttacctcggctccaccgagtcccagaagctgcactacacggtgcgcaacatcatcccgaccgacaagaccctcaccgatctgaccgccgatgacccggtggccatcggacagaccgataccatggccaacaccgccattctgcagtccggtctggccggcatggctgattggtgggatccggccaaggccttcggcgacgccatcctcaacaaggaagtcaccgtagacaacgctcaggccaagaccgacgcctgggtcgagcaggtcggttcctacgccaagtgatcgcttgacggctcgcagcacttggctggtgcggaccactcctctgcactggccaacccaacctataaccgaataaccaacaatcaaatatgaggggtccgtaaggtacgccagctgcgggcggatgatgtgaagccgttgcatccgcccgcagcccctcacctaccaacggtttcaaccttctttgtttctcctccttcattgccggcagagctcgggcagcgtgcatgcggtgtccgggctctgaacgggtttaagcgaagacaaacaacaagccgggcatcgcggcccggggcaacggtttccatcatttacagtgagaggcggaagggtgcaatgacagcagcagcactttccccgcgcgagatgaagcgccgccgcaaaatgggtgcggattatgtggcgccctcgccatactcggtaggcaacgcgcttaccaagggcgatgtgttcaccaaactatccgcagtcgtattcggactgggcaacatcgttcgcaagcaatacgtcaagggcgtggcactgctggtccttgaaatcgcattcttcgtatttctgttcaccaacggcatcacgtgcctgtccaagctccccagcctgggtgaccagaagcaaggcaaggtacttgtcgacggcttctgggagtacacccagggcgacaactccgtggtcatcctgctgtacggcgtctgcacggtggtgctctgcctgctcttcgtctatctgtggacggtctcgctcaagtccgcatacaaggccgagtgcctggcccgcgagcagggcaaggccccgagcctgggcaacgatctgcgtgagctgaccaacgccaaggtgcaccgactgctcatgttcctgccgacgctcggcattctggtcttcactgttctgccgttgatcttcatgatctcgatggcattcaccagctacgaccgcaaccatctggtgctgttcgactgggtgggcttcgacaacttcgccaaggtgttctccaacagcggcggcaccgtcaacgcccgcctgttcctgcaggtgaccatctggacgctggtctgggcgtttttcgccaccttcctgaacttctttatcggcatgttcttcgcgatggtcatcaaccgcaagaccacgcgcttcaagggcttctggcgtgcgtgcttctccatgtccatcgccgtgccgcagttcgtctccctgctggtcatgcgcaccatgcttcagcccaccggcgccatcaaccgcctgctcatggagtggggttggattgatcaggctctgccgttcttcacggatgccacttgggctcgcgtcacggtcatcgtgatcaacctgtgggttggtattccgtacaccatcatgcaggtcaccggtattctgcagaacatcccgaccgatcagtacgaggcggccaagatcgacggcgcgaactggtggcagatcttcaccaagatcaccatgccgtacatcatcttcgtgcttaccccgtacctgatcaccacgttcaccggcaacgtgaacaacttcaacgtgatctacctgctgtccggcggcaacccggtgccggtcggcgattccgcaggcaagaccgaccttctgatcacctggctgtacaagctgaccgtcgataagaacgattacaacctcggtgccgtgattggcatcatgacgttcatcgtcctcgcggtggtgtcgctgatcacctaccgcaattccggttcctacaagaacgaggagacattccgatgagcaggcattccgagcaggccgtacaggcttcccgtatgaagcaacctgaatcgcacggtctgatgcatgacaccaagaagcgtcgtattcttggcgacgtcctctcctatctcttcctgggagtcatggccatcatctggctgattccgattgtctgggtgtttgcggagagcttcaacaagaacaccgcaccctacaccaagacgttcttccccaccgagttctcgctcgacaactacatcacgctgttcaccgaccgctcggtgctgaacttcccgaagatgttcatgaacacgttcatcgtggcgtgcttcgtgtgcctcatctcggtggtgttcgtgctgtccgtggcctactgcatgagccgcatgcgcttccgcgcccgcaagaccttcatgaacgtggtgctggtgcttggcatgttccccggcatcatggccgtttccgccatctacttcatcttgaaggccgtgggtctgaccagcgaaggcatgaccaccatcgccctgattctggtctactccgccggtaccggcgcgggcttctacgtgatgaagggatacatggatacgattccgacctcgcttgacgaggccgcgctgctggacggttgcacccgtctgcaggtgttcaccaagatcatcatcccgatttgtaagcccatgatcgtctaccaggccatcatcggcttcctgaccccgtggctcgacttcgtgatggccaaggtgatttgccgcacgcagtccaattacacagtggccctcggcctgtggctcatgctgcagaaggaatacatccagaactggtacgcgcgcttcgccgcagcagccgtggtgatttccatcccgatcgccatcctattcatcgtcatgcagcgcttctaccaggaatcgatgtctggttcggttaagggctgacgcgttaagcagacagcccggtgggctgtctgtagcgtcagcctgagcgaggcgatagccgggcgaaggtcggattgagcctcgccgcaggcgagtccgtaattgcaggactgagccgttaagtagtggggtttaacttggctcccctctgaagaggggagccagaacaggaaggcgcaaccttatgaacgaagtggagatggcaaagcagcggcgtggtgagaagcgccgccgcaagggcctgtccgtattccgtctcaagatgatcggcgccctattcatggcattgggcgtggccggcgtctcggtcctgccggccatgttgggcgacccgactcaggacatggctgcactgaccgtggtggtggcgtgcacggcggcttcatggtgcgccatccccatctactcatggctgctgttcgacggctaccggcatacgggcagcattggaaaatatgtgctccgtctgttcatcgtcgcggtggtcagcgatgtgccgtacgacctgattatgaccggcaagccattcgacttgagcgcgcagaactcggtgtatggcttggtcatcgccctggtcgtgctcatgctggtggattggattgcataccagtacggcggggagagtctgcgcccgtggtccggtgctcagcgaggtggtgcggctgcggtgcgttggctgctgaccattgtagtcattctggccggactgctgtgggcgttgctgctgcgcgtgggcgtggatcagcggattatgtataccggtgtgctgacgctgctgtttgtgctggtgttctacttcctgaacgcgcgtgaaaatacgatgatgttcaccgccgggctgctgggtgccgtgatgtgcattacgcccggtattggtgtggccttcctgcactaccgcaatgacgaagtcgggttcaagcagtcttggaccaagtgggcctggtacgcggtctatccagtgcttttgattatcggcgcgctggcctagttacgccatttccccgaatggaatatcggtgctgcgcggcactagctgtgcctcgagcacctcgtgcgggtcatagagcgtcttgccgctgatgagcgtcaacgccttattggcagctgcgcggcccatcgcatacggatcctgacgcatggtcgtcaagttgatggtgtcggcataggggctgtcgtcaaagccgacaatcgaataatcgcgcggcgtgcggtggccgtaacgctccagcttgagcaccagcggaatcgccatcatatccatctggcagcagattgcgtccgggaactcatccatcgccagcagcgcggataatgcggagtcggcgaaggccgggccgcgcggcacggagagcacttcccaattgatgtcatgcttgccttcggcgtccttgcaggcgttgatgaagccctgtgcgcgtgcgtcaatcgaggaatccagcccggctgcctcggaacaggggtagacgatgtgcttgtgaccgaggttgatgagatgctgcgcggccgtgtacatgcctttttcgtcgtcgatgctgatggtggcgtcaaagctttcggaagacggcgtattgatgccgatgatcggcacatgaatgcgctgcagctgctcgacctcgtgcggatcgatagcgaacgaggccacgaaaacggcatcgacattgcggcgaatcggcaggtcggtgaagaactcatgacggtttgcggcggtatcgatgtgctggaacagcgagatgtcatagccggccggatgcatcaccgattcgatgcccgcgaacgtttgcgtattgaaccagctggtgatctcctcattcatcagcatcgccacacggtaggtctgtccggacttcagggcggtggcggagcgggagatgttgaaatcgagcttatcggccacatccagcaccttgcggcgggtcttcgccgagacgagttccgggcgggtgaaggcgcgcgacactgtagaaatggagactccggcctccttggctacttggtagatgtctgccttgcccatgttcctcctcgtgcaattcgtggtatcggctatgccacgtaatccccctaacgggttgcgccatccacgatgtgtaatcatttgtatcatatactgcaaacgttagcgcgaagctgggggaagtgttgcttggtgtggtatgctgattgggacatagtgttgcgaacgtatgcagtctgtcaactgtgctgcatgccgtttctgcaggagtggtgctgaaagtgttgcaaacgttgtcaacggtctgaccgtgcgataggggggttcccttcatggttcgtgcggtcaatgctcaaggatgagagaaaggactcatatggccgtacgacgattcagctcgctcgccaaacgccttgccgtaaccggcatagcggtggcaatgtttgccacaacactggtagcattgccggcttctgcggacgaggccgaggccaatgcacaggcgcgcacatctgttggcgcgccgggcgatgtgatcgccatcgcattccaaaccaactggaattcggtggccaaggagtgtaccgaggcttacggccccgaaggtgtgggctacgtacaggtctccccgccgatggagtccatccagggcactgaatggtggacctcctaccagccggtcagctacaagctcgactccaagctcggtacggaagccgagttcaagaccatgatcgccacgtgcaacgcggcgggcgtcgagatcatcgccgactcggtcatcaaccacaccaccggcgccgatcagggcgagggcaccggcgtcgccggcagcaagtacgacggcgagggcaacttccctgcaatcccgtacaccaaagagaacttccacgactgcaccaagaacatcggcgactacaccgacgccgacgaagtacagaactgccgcctgaccagcctgcaggacctcgacaccagccaggaatacgtgcaggacaagctcgccgactacatgaaccgcctgctcgacctcggcgtctacggattccgcgtcgacgcggtcaaacacatcgccacggccgacgtggccgccatcaaggccaagctcgccgagaagtccggccgcaacgccgacgatatcttcttcgagcaggaagtcatcggcaacgcctccgaagccgcggaaatccagccgagcaactatgtggcgaacggcaaggtctccgaattcaacttcaccaaccacctgtcggtcgccttcgccggcgacatcaccgacaccagcaagggccttgcgaaggtcggcggcgacggctgggtgagctccgacaaggccgcagtgtgggtgaccaactgggatacagagcgcggatcggccatcacctataagaagggctcgaagtacctgctcgcgaacgcgttcatgctcgcgtacgactacggccagccgcacatctactccggctactacttcgacaactccgacgacggcgctcccggcgccaccgaaacctccgtgcccgacatggagtgcccgaccgacggctcgatgacctccggcacctggcagtgcgccgaacgttggaccgcgatccgcggcatgatcggcttccacaacgcggtcaacggcactgacgtcaccaactggaaggcgtacgacaccaacgtgctcggcttcggtcgcggcgacgtcggctacctcgcgctcaacaacagcgccgacgactccaagcagacgttccagacgtcactgcccgccggcgaatactgcaacgtgtacgccaccggcgactgctctgcaactgtgaccgtgaaggacgacggcacgttcgacgcgacgctcgcgaagaactccgccatcgcgatctacgcgggcgcgaccaaggattcctggaccggcacgaccaagtccgatccgtccgatccggacctgtccgtcaacgacgagaccaagaaggccgcggccgacacgagccgcaccatctactacaagctgcccgacggccggaagcaggcgtacctccactacggtatcgacggctgggccgagcagggccacgagctgatggccgacgccggcaacggctgggtcaagttcacggtcgatccgaagggcaagtccttcgaatacgtattcaccgacggcggcgacaactgggacaacccgaatggcggcggcaactacaccgcgcagggccactggacggcggtcgccgaccacgaggccagcgccggcgtgccctccgacgtgcagtcgtaccagcccaagaccaaggtgatcgtgcactacaagcccgccgaaggcgacgccgtcgccgatcgcggcgtgtacatgtggggcaccgacaagaacggcgccaccctgaacggcgcgtggcacgccttcaccggcgaggactcctacggcaaggtgttcgagaccaccatcgatggtgcgtacgacgccgccaagatcggtgtgatcgtcaccaccgaaggctgggacaaggtcggcagcgaccgtaccatcgacggttccaccggcaccgccgaaatctgggtcgacggcgccaatccggacgaaacgctcaccgaagcccccgacggctacaagaaggccgccaaccagatcgacgtgaccatccactaccaccgcctcgccgacgactacaccagcgaagacggcatgaaggcatgggacatctggggctgggccgacggcgtcaacggtgctgcctacccgttcaccgagcacgacgactacggcctgatcgccaagtacacgctcaagggcagcggcatgagcactccgcagttcatcgtgcgctacggcggcgacagctgggaagccaaggatccggacgacgagaaccgcacgatcccgcagtccgccatcaccgtgaacgccgacggcaccgcatccgccgaaatctggctggtgcagggcgacacgacgatctacaccaacggcacgctctacgacgccaagggcatgatcgtctccgccgaaatgaccgacttcaacaccatcacggtcaagctcaacaaggcgctcaccatcgacaagccggccgacgcggtgtcggtcgagggtgcgaagatcaaggacgtgaaggctagcgggaacaccgtgaccattaccacggccgacaatcttgacgtgaccaaggcctacaaggtgacgatcgaggactacggcacgcagaacgtgtcgctcggcgccgtcgtgcgctctgacgcgttcgacaagaagtacgcctacgacggcgatgatcttggcgtgacctacaaggccgagaagtccacgttcaagctgtgggcgccgaccgccaccaaggtgacgctgcgcctgtacgccgactccaccgatccgaaggcagcgcagaccgacgccgtgacgctggagaagtccggcaagaagggcgtgtggacgttcaccgtggacaaggatctcaaggattacgcctacgactacgagctgaccttcgccgacggcacggtcaacacgtccgccgacccgtacgcgaccgccgccgtggccaacggcgagcgatccgtcgtgctctccgacaaggagaagggcgatgccggcaagcgcatggcgtcgttcagcaagccgaccgacgcgatcatcaccgaggcgaacgttcgtgacatgaccatcaacccgaactccggcgtctccgaagccaatcgcggcaagtatctcggcttcgtcgaggagggcaccacggtcgacggcaagcagggcgcggcgcccaccggcatcgactacctcaagtcgctcggcgtgacgcatgtgcagatcatgcccgtctacgactacggttccgtggacgagaccggcgatctgagctacggcgcgcagtacaactggggctacgatccggagaactacaacgtgccggaaggctcgtactcctccgacccgagtgacccgagcgctcgcgtcaaggaaatgaagcagatggtctccgggctgcacaagaacggcctgtacgtggtgatggatgtggtctacaaccacgtctacaacgcctccgaacacgccttcaacaagaccgtgcctggctactacttccgctacgacgccaatggcaacctgaccaacggctccggctgcggcaacgacgtggcttccgagcgtgcgatggcccgtaagtacatcgtcgattccgtgaagtactgggcgaccgagtacaacgtggacggcttccgcttcgacctcatgggtctgattgaccagaccaccatgaatcaggtgcgtgcggcgcttgacgagatcgatccgtcgattctcgtcatcggcgaaggctgggatatgactgacgccattggcaaccaggaaaccacgcagcccaatgcctccaaggtcaagggcgtggcgttcttcaacgactccctgcgcgacgcgatcaagggcagcgtgttctccgacgaggacaccggcttcatcgccggcaaggccgacaaggagaacctcatcgccaccaacgtgctcggctgcaacaacaagcgcgagggcatcgatgagaacggccactgcaacaacggcaccgccgacacgaactacggcggcgcggatcaggtggtgcagtacgtcgagatccacgacaacctgaccttgtacgacaagctggtcaagagcgcgcccaacgactccgaggagacgcgactcgctcgcgccaagctcgccgactcgctgattctgctctcgcagggcatcaccgacatgcagttcggccaggagttcctgcgcaccaagggcggcaatggcaacagctacaacgccggcgacgcggtgaacgccatcgactggaaccgcacggtcgagcaggcgggttccgtgaactatgtgaagggcctgatcgccctgcgcaagtccatcaagaacctgcacctgagcagctatgatgacatcgccaagaacatgacggtgctgcagcagtccgacggcgtggtggcctaccagctgaaggacggcagcgacacgtatgtggtggtgttcaacgccaacgaatcggccgcaacggtcgaggccgtgccggctggcaagtacaccgtgctggccgccgatggcaaggtgacggagacgcaggacaagaatgctgcaaccaccgtgggcgctgacggctaccaggccggagcgctcgccgctgccgtgctcaaggccggcgtcgacgatgattcgaccaagcccgatggcggcaaggacgataaccagtcgggcggcgccgccaccccgggtactccgggcgatagtggcaacggcaatggtcagaccggtgacggcaacgcctccaacggcgcatccgacaccgcggccggccaatcccagcagttcggcgctgccgctctgcccaacaccggcgtagccctgtccgtcatggcggtcgccgtattggtgatgaccgctgccggcatgctgttgcagcggttctccaagggcggcaatgtcgtcaacagtaaggagggctccgaacagtagtccacaccgcgtcagttgctgagtggcccccgctggcgggggctgtcagcgaagttgactgggggtggctcagagccgctctaaaaaacctgagcctacatcgctcaacttttgtgatgaatttgggaatagaacttgccaaacagaagttgagtgatgtaggctcaagttttggaaggcccaagaaccaaccaaggaacttgagcgaacaacgtaagaacaaacgaataattaaggagcacacattatggcacgtgcagttggtatcgatctgggcaccacgaattcctgcatcgctacgctggaaggtggcgagcccaccgttatcgtcaacgctgagggcatgcgcaccaccccgtccgtggtcgcgttctccaagtccggcgaaatcctcgtcggcgaggtggccaagcgtcaggctgtgaccaacgttgaccgcactatttcttctgtcaagcgtcacatgggcactgactggaccgtcgacatcgacggcaagaagtggaccccgcaggagatttccgcacagattctgatgaagctgaagagggacgctgaggcttacctcggtgagcccgtcaccgatgctgtcatcacctgcccggcatacttcaacgatgcccagcgtcaggccaccaaggacgccggcaagatcgcaggcctgaacgttctgcgtatcatcaacgagccgaccgcagctgctctggcctacggtctggagaagggcaaggaagacgagcgcatcctggtcttcgacctcggcggcggcaccttcgatgtctccctgctggagatcggcaaggacgacgacggcttctccaccattcaggtgcaggccaccaacggcgacaaccacctcggtggcgatgactgggatcagaaggtcatcgactggctggtcggcgaagtcaagaacaagtacggcgttgacctgtccaaggacaagatcgctctgcagcgcctgaaggaagccgctgaacaggccaagaaggagctgtcctcctcgaccagcacctccatctccatgcagtacctggccatgacccctgacggcaccccggtgcacctggacgagaccctgacccgtgcgcacttcgaggaaatgacctccgacctgctgggccgctgccgcacgccgttcaacaacgtgctgcacgacgccggcatctccgtgagcgacatcgaccacgtggtgctcgtcggtggttccactcgtatgcccgccgtcaaggacttggtcaaggaactcaccggtggtaaggaagcgaaccagtccgtgaacccggatgaggttgtggctgtcggcgctgccgtgcagtccggcgtcatcaagggcgaccgtaaggacgtcctgctgattgacgtgaccccgctgtccctcggtatcgaaaccaagggtggcatcatgaccaagctcatcgaccgcaacaccgccattccgaccaagcgttccgaggtcttctccactgctgaagacaaccagccgtccgtgctgattcaggtctaccagggtgagcgtgagttcgctcgcgacaacaagccgctgggcaccttcgagctgaccggcatcgctccggctccgcgtggcgtcccgcagatcgaggtcaccttcgacatcgacgccaacggcatcgtgcacgtgtccgccaaggataagggcaccggcaaggagcagtccatgaccatcaccggtggttccggcctgccgaaggacgagatcgaccgcatggtcaaggaagccgaggctcacgaggctgaggataagcagcgcaaggaagacgccgagacccgcaaccaggctgaagccttcgcttactccaccgagaagctcgtcaacgacaacaaggacaagctgtccgacgacatcgtcaaggaagtcaccgacaaggtgaacgctctgaaggaagccctgaagggtgacgacaccgataaggtcaagaccgctcagggtgagctgatgacctccgctcagaagatcggccaggtcctctacgcccagcagggtgctgaaggtgccgcggctggtgccggtgcggccggcgcttccgctggctccgcctccggttctgacgacgacaccgtcgaggccgaggtcgtggacgacgatgacgacaaggacaacaagtgatgtccgagttcaacaaggacgactacctgaacgacctgccggatccctcagatgctgaggctgccggccaggccgctcaggcctcttcaggggctgacgcctccgccgagtctggctctgcgcaggattcggctgcccaggctccttccaatgaaggagccgacgcggctcctgccgcagctgagggagagaagtcggatgccggaaagaagactggcgaagaccagtctgattctgaagacaccctcacccctctcggcaaggccaagaaggaagccgccgactacctcgaagccctgcagcgcgaacgcgcggagttcatcaactaccgcaatcgtgcgcagaaggagcaggagcgcttccgccagcatggcattatcgacgtgctgaccgcgctgctgccggcccttgacgacatcgaccgcattcgcgagaacagcgagatggacgattcgttcaaggcggtggctgccaagatcgacaaggctttcgagaagttcggcgtcgagaagttcggcgaaaagggcgaggacttcgaccccaccaagcatgaggcaatcctgcacaagccggatgccgatgccgacaaggaaaccgtcgacaccgtggtggaagccggctaccgtatcggcgaccgcgtaatccgcgccgcccgagtagtagtagcctccccgcaaaactgataacggccagctcgctaacgagctgacattatcttggctcccgctggcgggagctggcagccgaaggctgactgagggtggtcaaacactgaatataaaccaccctcagtctcgcttcgctcgacagctctcgccagcgggagccaaccataaagacttttcaagaaaggagacatgaatggctgaaaacgaatggctcagtaaagacttctacaaagtccttggtgtctccaaggacgcttcggacgacgacatcaaaaaggcgtaccgcaagctcgcccgcaagtaccaccctgacgtcaacaagaccaaggaagccgaggagaagttcaaggacatctccgaagcttacgacgtgctgagcaagaaagaagatcgccaaaagtacgacgcgattcgccagttcggtatgggcggcgcccgctttgccggtggttccggtgccggcggcttcgacgcttccggcttctccgacatcttcggctccatgtttggccagggtgccggtggcaacggttcgcgtatccgcttctccacttcgggcggcggcaaccccaatctcaacgacatcttctcgatgttcggtggagccgcggggcagggtgctggcggctacggccagcaggcatacggtaacgccggtggctacggctatgaggaagccccgcgccccgaaaacggcgaggaccgcaactccaagatcagcttgacccttcgtcaggcggtcaagggtgcgaccgtgtccctgtccgtggatggcaagaagttcaaggctcatgtgcccgccggcgtcaaggacggtcagaagatcaagctggccggcaagggcaagccgggcatcaacggcggcaaggccggcgatttgtacctgcacgtcaccgtcaatccggattccacgttctcgatgcgcggtcgtgacatcgtcatgaacctgcccgtcaccgtaggccaggccgtggccggcggcaaggttgacgccaaggacatcgacgggaacctggttaccttcaaggtgcccgcgggctccagctccggtgccgaggtcaagttggccgggctgggcgtcaagcgtggcaaccagccgggcgacctgatcggccgtgtgcagatcatggtccctgccaagccgggtctggcggtcaagcacgccgccaaagaattcgacgaaaaagccggcgactatctcaactaacaggggctccgctggcagaagctgaatgagcgcaatcttggctcccgctggtgggagctgtcagccaaaggctgactgagggtggtcttggctcccctctctgaggggagccgggagtcgaaccgaaggctctcaaaatcataggaggtgaacaatggcgcggttagccaaccagatgaagcagttgtacgcgatgtgcgcaaccgcgctcgtgatgggcagggccgatctcgacggagccgatgacgtcggcttcgacatcgaactgcccatcttcaccgtcggccagaccgccgagttggccaacattcacccccagaccctccgtcagtacgaccgcctcggtttggttcgtccgcagcgcacggatggcggcgctcgccgctattgcctgcgtgacattgcccgcctgactcgcgctcagcgcctgagccaggacgaaggcatcaatctttccggcatcgcacgcattttggtcctcgaagaggagaatcgccaactgcgccgcgaagtcaaacgcatgcaaaccggcgaccaggagagcgttttcgccgcaggccgtgacggcaatattgtggaggtacaacgctccaaccgcgcccgcctctggcgcaacgccatccgccgcgaaacccgcgaactgcccggccgcgatactgccgccgataccgctgccggcgccaccggcgactccaactccactcccgccgacttcaagtccatggtcctgtggggttggtgagtctggccgcgttgcttcgattccttctccatgcgtaaaactgtttgttatctcacatcgggcagctgccgaaagaagcacgaattttcttgacggaggtgtcaaggtttgttacggttcttcgcagactaccaaattgattgcgggcaaagtcgccggatccaagccctgtctaggttacggagcaaaagtcgggttggcgttcattggccgagaggctttgcgccctgatacctatgccgataccgtgcatcgtgtggctgttgacatcgccacatatgaccagcaaagttgcctggctccgcagaccgtgttcgtggagactgatggagccctcacccctcgtgaagtggctcagctgctcggtggcgaacttgagaatcagcagcgcaaatatccgcgctccgtattgagtgacgccgagaacgtggccattcagcgggcgcgcaccgacgctgagatgagagccttgatgggcgggaaggccgcggtgttcgccagtggccatagcacggcatggtcggtgctgtatcgagaacttgacggtagcggtgccgacgaggatgttgcttcgctgatgtcgccgttgaaccgcaccgtcaacgtggtggcggtgccagatttgttggacgctgccagaagactgacttcctgccgtggctggctgcagagctgcggtgtcgctgtggattcaaccagactgtttggtcttgcagatatattggccgcggtcggtgtgaatcgcatctgtccgctcggtgagatggatcgggcgaaatccggctggcatcatgatgggggcttcaacctcatcgatctgttgcgcgcggtggatgtcgaacgcggcagcgacgcgtacagcgattcgttcgatatggatatggaataggcctgtgctgttgcgggcagcaggggctggtagcagggcgaaaggcaagggcaatgacagagcaaagcgatatggcacggcgtccaatggtgaatctggatggcagaacagcgattatcaccggttccggcaagggcataggagcggccgtggcgaaatgcctggcatcgcacggagccgctgtcgtcatcaattacgtacatgacgccgccagcgcgcagcgcactgttgaagacatccactcactgggaggcttggctatagctgtacaggcggatgtttgcgatgaatcgcaatcttccaagctggtgggtaccgctgtcgactcattcggcggcgtggacatcttagtgaataatgctttcggacgcttctcctttgatccgcgtcgccgttccacttttgctggaggcgattgggatgagtttagcgcacagatcgagggatgcctgcatggtgcatatctgatgtgctcacatgtggtgccgctgatgcgagcccagacctccgggcgtatcatcaacatctccagcaatctggtcgattcgcccatcgtgccctaccattcgtatatcactgccaaaggcggcttggtcggcatgacccgctctctggcccaggagctgggcggcttcggcattaccgttaatgccattgccgcaggtttgacggccggaaccgcatccagcgcagccgccaccgaggatgttcgtgaacgaatcattgccatgacgcctcttggccgccttgcccgtcccgatgacatcgccggaggggtcgcgttgttggcgtccgacatggccggcttcattaccgggcaatgtctgcacgtcgatggtggtttgaccatgcgctgaagtgccggagcggtgtgctgacgcgctatggttgtcgcatccggttggtgcaatggaatgcagcaagagtaaaggcgccgattggcgtgcggtcatgcgaacggaggtaaccatgctgctcaaagccgtgttctgggatttggacggtactctcatcgattctgagccgctctggcatgacggtgagattgagatcgcgcacaacaatggcggcgagtggaacgaggacctcggttgggagtgctccggcactccggtgccacacgtggcggaggtcatgattgcgcatggctgcacattgagcattcctgaaatcgacaagcagctcaaggattatgtattcaaggcggaggtcgaacgtctgccgtggattcctggtgtgcaagacgtgctgcgttcgctcaaggaagccgacatcccatccatgctggtcactacttcgcctcgccgcatggccgagaacatcatgaagcaggctgatggattgcttgccggctacgtctgcggcgatgatccgtacgagcacaagccgagccctgccccatatctggccgcggctgagagactcggcatcgcgcctgaagacatggtcaagtgcgtggtaatggaagattcctcatccggcctgcgctccggcgccgcctcgggggccacactaattgcgcagactggctggattcgcaccgacacttccggccttggtcagtttgcctccatcgactcgtatgagggcatcgatgcggccgcgctggacgcctttgtgcggcagcgtttgggggagtagaaatttcgtttgtattgcggagtttgtgtgggaaacccccagtcgacctgatgttataggccggctggtagggtgtttgacggtttgcatataactgtctggttcattgggctggcagctcaatacaagatttagtactcataggaaacacatgggcttcgttaatttcatcctcgaactgctgaaggatccgcgtgccgcgattgccggttggattgccatgggtgtggcgccgaccctcggcttcatcttcctcatcgtatttatcgaaacgggtgtggtgttcttcccattcctgccgggcgactccctgctgttcgctgccggtgtgttcgccgctcccgatgccgcgaccggcaaggctgcgctgccgctgttctggctgctgccggtggtctggtgcgccccgattgtcggtgaccagtgcaattacttcattggccacttcttcggccgccgcattatccagtccggcaaggtgaaggccttgaccccggagcgtttggccaaaaccgagcacatgattgagaagtggggcccgctggccgtgttcctgggccgtttcttcccgttcattcgtacgttcatgccgttcatctccggtatttccggcatgcgttggagccgattcaccccgttctcggtggctggcggcctgtgctggtccacgctgttcacgctgctgggttacttcttcggcaatattccggccgtgcaggatcacttcgaattggtgatcgtgctgattctgctggtttcgctggctcccaccatcatcggtttgctgaaggccaagttcggcaagaagaagccggagtcggttgccgattcccagctggatacgatggaatccggtatcgagaaccttaataagtagtttttggtgctgtagggttcgtttcttttccaagccccgttccgcatgtgatgtgcggaacggggctttgttgtgttatccacattgttggtggacaacatgccggggtgtggataattcggcaagctggaaccacagaacctgatttcggttgaaataggttggctcgcacggttcaatctccctatgaatatcgacacatcctctcgcactgttcgcgttgctcgctctccggcagcggccgtttcgtcctctccccagtccgctggggtcgggccctccccgccaccgcgctactacacccctcctccgcaaccaatggctgcgtatgagagaaaacggtcgaacaggactccggaagaatcgttctccacgaacgtggcattgcacaatattgtgaccgtgacttcgggtcacggtggcgtggggctcagcgtcatggcctctatgcttgcgctgacgctcacggagcgtgggcaaagctgcgtgctggtcgatgccgatttcgtggcgggatgcttggatctgctgctaggcctcgagcgtgagccgggtctgcgtttcagtcagatagacgctccgttgggccgtattgaaggagcggcactgcgtcatgagctcattgactgggagggtattcgtgtgctgccgtgcgatccctggagcacgcggcagcctgaatggtgggaagtgcaggccgtgattcgggcacttgccgaaacgcacgatattgtcatcgtagatgccggccagggaggcctgattgaaacagtgagtgacttgcgccatggagtgcaggttatggccgcggaactttcggtaatcggtttggcccgggccaaagcccatcggctcagattgtccgcatgggaatgcgggattccccatatcgtcggcatcgaaccgagaggtacgccgcgaggtcgcgggagcgtggatgttgccgaagccgaagattatctgagcgctgcagtggtgggtcccatccgtctgacttccggcttgtgcggtgatgtgcttgagggattaggcatccgatccgtgcccaagggaagtcgtaaggccatcgaggcactcgccgatgcggtggagcgggatattcgcgctggtgctcgggctgcctgattgaagtggggatatcatgacggcattgcatcgcgcaggcatgtttttcgggttattggatgagcttgcttcagatgatcgagtcactgatattgcggtgacttgtgagggccgcgtctgggcggatcgtggcagcggtatgcgggagcatatcttgcaagtgccattccgatcgccgcaagtggtgcgtgattatgcggtgcagttatgcgcgcaattggggcgtcgcctggatgatgcgtgccctattgccgatgcctccaatatgcatggtgtgcgtgtccatgcggtgatagcgccgttagtgccgcaaggggcgtcgatttccatacgattccccggcagcgaggtgacatcgttgcagcggcttgcccagttgggcatgtttcctgccggctggatttcggtactaagcgggctggtgagcaagagagccgccgtgctgattactggcggtaccggcgtgggcaagaccaccctggcaaaggcgttgcttgcgcagtgtgatgcgaatgaccgtatcgtcaccgtggaagaggtgcgggagcttggcgattttggccatgggaatcatgtttccatggcggtgagggaagcgaacgttgaaggcgaaggtgcggtgggccttcccgatttggtgaaagccacgctgcgcatgcgccccgaccgggtggtgttgggggaatgccgtggcgaggagattgtggatctgctgagggcgttcaattccggccaccggggcggcatgaccaccttgcatgcgaacagcgtggcgcaagtgccgcagcgtttgatcgcactgggattactggccggtgtggctcctcgtgcattggccatgcttgccgaaggcgccttcgatgcggtgctgcatcttgaacgagtggacggccgtaggcatattgcacaaatcggcactttgcacgcctcgtatggtgaattgcaaggcgttccattggtggcttgggacggttcggccgagcctcgatattcacctcagtggcgtgatttcgcagcattgtggggctgtagctagggggtgggatattgctctggtgtgtgatgctgacgatggtcgctgtgctgatatggcctagtcgccaatctggggttgttgatcgtctgcgtgatgtgcggactctttctggaaggttcaatcgaggtgctggtggagatttcgtgagccggaatggatggggctcgaacgtcggaggtggtgctggacgtagaacgacagcagcattgccgaggagcggaatcgctcaggtattggcctccgccatcgctcgcatggcaggtggaggaacgctggtggaagcgttcgaggagcaattcggcggacgttttgccgtgcgcaggctgaccccacaacgcctgaccgacttgtttgagcggcgacgattgccggacgaatcacgcgcgcagtccgtgcgtgccgccatgggcgctgctgcggcagcaacagtcagcgaggaattgggctgccgtgccgtgccctgcttggaggcggtattggatgtctactcgcatatgagattgatgcagaacatgagggcgcaggccttcgccgtgcctcaagccacggttggtttgctcagcgcgttgccggcaatcgcggttgtgttgggggaattgatgggagctcaccccttgctgttcttgttcggttctcaacgcggcctagtgtgtttggtgtcgggcggatgctgctatgtggtcggtctggtttggatgcgcgccctgatgcgagacggctgacagctatcggggtgagacgaagatgattggaacatgcattgcatcggggtgcgcggcgttcgcatgctggctgagcatggtgaagccgcgtgcagccagtcgtctgcctgacattgggcaatgggcgaatcatgacgagcctgttgtggttgccgatgcggcatggaccatgctggtgctgcggatggtgcaagtgtctctgcggcaaggagcctcggttccgcgggcccttgatgttgtgggccgtgctgttggaggcgcatacggtcgatgcttaagccgcgtgggtgaatcattattgcgcggcgtctcatggtcggacgcatggtgtgccgccttagccgggacggatgcttcggcgggtatgaaccattccgctcgtttgggtggcgcaaaacggcgaggccggtcagggcagcatggcgatacggatggtggtgctggtgacatcgcactgggcatgatccgcgagtctttggaaccggcttggttgcaaggggattctcccggagtgcttatcgacgctgctgtcgaacagcttgataaggatgagcgagcgcgtatagaacgtgccgctgcccgtttgtccgtgcgtttgctgatgccgactggcttgtgctttttgccggcgtttgtcattgtcggagtgcttccagcaattgcttctttcctgatgtaggtttcttctggcctgttttggttgtctcgtcttgcgttgtgccatgacgcatggctggtggttatccacttttgttgtggatgacacgccgcggtgtggataacttggcaagctggaaccacatgtgccgttcgctgatgcgccgcacgccggattgcttcacagtggaactcacctcgcgtcacagtgttcggcgcgagggccaaacgctatcgcacggagtcaggaaagcgcacgattgatgtgggccttcccgtggggaaaggaataccgatggacacgcacattcccatcatcgttgatggtcaagcgggcatatttgcccacagcaaagccaaaatcgcagagctcaacgcccgtgccaaagaacgactatgcctcatggatgtacggatgcgcacgcttatggctgagccggaagaaggagcggccacagccgagtacgcggtggtgctgattgccgccaccgggttcgcggcgcttttggtcaccattctgaagtcggatgccattaagacgttgctgacaaatctgatcaaaaaggcgttgaacgtcgggtgagcgactcggaagggcaatgaacatgagaaaaggtctcagcagatggctcgcccgtttgccgcctgtgcacaatgagggtgcggccacggccgagttcgcggtagtgctgcccagcgtcattgcaataacgggggtgttgctgacgcttacccgagtggttgcggtatccatggattgccaaagtgccgcaacggcatccgcgcgtgaattggtggtttctgatgatgaatccgcagcacaacaggctgccgtgaatattgtgggaagccgagtggatgtgactgtgcatcaggaaggcagcttggtgcgagtggcggtcgaatgccccgttttgccagggcctttgaatgtgactcctactcgggtgcatggggaagctgtggctgcgcggcaataacacacacggtcggtcgggagggggaacggcgatggcggcatgtatgccacgtatgtcacgtcttgaagaagggtcaggcacaatggccggtgtcatgctggtcatgctggttggggtggctctttcggcaacggcatgcattggcaatctggtggtttgccaaaaccgggcacgttccctagctgacctcatcgctttcgatgccgcctatgccgcatggcatgggtgggcggacgatccatgcgcgttcgcaggtcagctggccgtatccaatagcgtcgcattgcccgattgcatggtgcagtcggatgatgtgcaggtcaccgtggcagtggatactgcagtcccattgacgccgcgcgtgcagcgaacggctcttgccggaccggcggaatgcgataagggaggtgctagtgagtaaccacacagcataaaacagggccgcattctagcggacttccgccatccttggctaaggtaaaagcatgagcgagagtgaacacaacgagcgccgcagcatcgtggcaatggtgggaaaccccacctccgataaaggacgcggtgccaaggtggatgcgcaggtgctgaatctgctggaagaggcaggtcgctcccataattttgaagtcatcgacattaccggtacgagtttcgaggattcattgcatcaggctcgtgaacggtcgcatgagtatgactacttggtggtggtcggtggcgacggcatgatagcgcttggcgccaatgcggttgggtgcagcggcaagcctttgggtattgtggccatggggtcgggcaacgatttcgctcgcgggctcaagctgccggtgaaccgtattgaaaccgcggtggaaggcatcgtgggcgccatcgtgcgcggttcgcatatcgatgtggacatgggccgtgtgacttccttggaaggtggttatgcggtagatacgtccaccggggaggaatacgagtgcgagggcgacaggtccgctgagtatccgatcgatcgctactatgctggcatgctctcctgcggtcttgatgcgagcgtcaatgaccgtgcgaaccattcgcgtctgccgaccggcaccatgcgctatttctcggcggcactggtggagctgacgcatatgaagcgttatggataccacatcaaggccacgttggccgatggttccgtggacgagagggacatcatcaccccgctgttgacagtcgcgaattcacggcatatcggtggtggtatcgaggtgtcgccatactcctgtttctccgacggattgctggatttggtgtggatggatcatgtgccgaacgtgcgggagtgcgcagtggctcttgcgaatgcgtataacggcaagctgcttgcctccgacgtatttgggtgggagcggattcgagaaatcgaggtcactcgcgcaaacgaaggcgatgagcctccggtgctgatggctgatggtgaatacatcgggcatttgccggttcgtgtggtggcggagaattgcgcgctgcgcgtgctggtgccgccggccgtggcggcacgtgaggtcgattccaggcagcaggtgctcgatgccatcacccgcgatggccgtgatcccgtgaccggacgctttaactagacgaaaatgctttggctcccctctccgagcggagctgtcggcgaagctgactgaggggaggtctgccgctggcagcggttatgcgatgtagctttcgatgtgtagcgtctgtgcaatgacttccttgatggtgcggtcgctgacaccggggtgtgagcggatcagggagatcagtcccacgttgagcgtgaagaacgtctcgtggacgttgatgattggcagcccatgcatctgctcgaagtcgcgcactgtggtctgggcgatgtagtctgcgatgcggtcggcggcccggtcgatgaatttgatgtacagttcggcgttgccgtcctggatcatccggttcgagaacgggctttcgtcggcaatgagcgaacgcagtacgagaacgatttcgtcaagcgccttgttcacgttgccgatttcgcgggcctggttccattcctcgagcttggtgaggatctcatcgatcacatcatccagcacggcgtcggccacggcgtccttgtcgttgaagtagtggtagaacagcgatcgcgtcatgccgaccttgctggcgatgtcggagacggtgatcttggagaagcccttttccaagcagatttcgcgtgcggcgcgcacaatggactcgcggcgagtgtctccgcggctggcgcgcttgtccttgagaatctggctcatgggtgcctcctgaatgtaactgatgttgacactatgttaaacaaacgggagtacgaggaaataccgaacaaaataacgtcaattccgaaaccgtgtggtgcatggcgcccatgagatcgccaatatatcgacgaagcaatgaactgctcggaacggtatataccgaaacgatctctgttatttacgaaaaattgagtgaggggcaaggtaggttagtagctatggcacttgcactatatcgtcgctatcgtccggacacctttgaaggtgtgatcggccaggaccaggtcacggttcctttgatgcgagcccttgacgagggcaggctcacgcatgcctatttgttctccggcccgcgaggctgcggcaagaccagttccgcgcgtatcctggcccgttgcgtcaactgcgccaagggcccaacctcgcatccgtgcggcgagtgtgaaagctgcaaggatctggccaccggaggcccgggatccatcgatgtggtcgaaatcgatgccgcctcacacaacggtgtggacgatgcccgtgaattgcgcgaacgcgccgggttcgcccccgcccgcgaccgctacaagattttcatcctcgacgaggctcacatggtcacgcagcagggcttcaacgcgctgctcaagatcgttgaggaaccgcccgagcatgtgatgttcatcttcgccaccaccgaaccggacaaggtgattggcaccatccgctcgcgtacccatcattacccgttccgtctggtgccgcaggaggtcatgggcccctatctggaaacgatctgcgagaaagagagcatcaagcctgagcccggcgtgctgaaactcgcgatgcgtgccggcggcggctccatgcgagacaccctgtccgtgttggaccagctcatggtcggttccgtcgagggcgtcatcacccatgatgccgccgtggctctgcttggtttcactcctgaagcgttgatcggtgaggccatcgatgcggtcatcgatcataacggcgaggccctgtacggcgtgattcagaaggtcgtggtcggcgggttcgacccacgacgattcgtggaggatctactggcccgcgtgcgtgacctgctggtgctgactttggcgggcgaccgcgcggaatccgtgctgtcagacacggccgaggccgaggacatggacgacctgcaccgccaggccaaggcccttggactgagcgcgctcaccgccattgcggatatcatcaacaccacgctgggtgccatgaccggtgccatctccccgcgtatgcgactcgaattgctggcggcccgactgctggccggcagcgaaaacgggttcgttgcacccgctgccgctcccgcattgggagctcccgcgccagccacaggagctgtagcctctgccgctcccgctacgggaggtgcggcaggaggcttcgctggagcgtctcgcggcggtttcgccggggcctcacacggtggattcgccggcgctgcacgaaatcaagcacagacgcagaccgcgcccgcagccgccgcccctgctgcgcctgcatctcctgctacgaatgctgcggctccaagctccgactcccgatccactgatgaaaagtggaatgcagccgttgccgcattgccgcaggccatccgcgaatacgtcaccagagacaaggtgccgacggtggcattcggccccaaccgtaagggattgccctgcctgtccatgaccttcgacaagccactcagccagcatgcgtttgcgctcgcggtggataacagcggcaaaaaggccgcaatcgtggtgatggatgccgtacgccaggaattcggtgccgatgcggttatcgctcctgcggccgttgcggccaacggtgagcgagtggaatccgtcaagcgcctgagccccgaacagttggccaaggtcaagcagcagattgcgatggccaaggcgggtctggccgcttcgagtctgggagctggcctgggcatgcattccggcagtgagccaaaagctcagaagccggttgctgaggggaacgccgaagatgcggatggcagccaccgagcctctggcgtaacgccgggaggcacttcgaacaagcccgatttggatgatgacgatccatgggccaaacctgccgcatcgtctgaggctgtgggcgagccatctgcgtctgcaggtgagccgtctgttgatggttttgctccgagcaatccagaccctgcatctgcacaggcgcctgaagagcaccacaagaagcatgtcgccgtgccggacatgagcgatgacgtggacccatgggcaacgccggcagcacctgtcgcacacgcacaagatgcgaccgccaatacccaggccggccaagctgagcaatccaccgcgtctacttcctcgaacgtgggtgccccggctgcggattctgctgcctcaacggcatccgctgacccgtggaaccggccggtgcctccgcctgccgaaccgatgggtggcccgtggaaccagcctgctgcgtctgcgccgcaagctgcgccggatccatggaatcaaccagctcctccgcaatcggaaccggatccgtggaatcaaccgcaggatcaggctcagcggcagaccccatcgcagagtcagggtatgccgcaaagccagaactcgggcgctgctgacccgtggaaccagccaatgccaccgagccctcagccgcaggttgcggccgaggacgatgagtattcgatgagcgaccagtcgcttggcgatgccacggccatgaagatggatgatctcaagaagctgttcgaggtcaagaaggtcgaggagtttgcggccgatgacccaaagaacccgaagaacatccagcccgccaagaagcatacggatgactgatcgcagcacaccatacgaaacaaagaaaaacatgaggagcacacatggcattggcctatgacggcgccatccagcggttgattgacgcattcgggcacctgcccggaatcggtcccaaaggagctcagcgcattgctttctacatgctgtccgcccccgaagatgaggcccgcgagctggccgaggccatcgaagaggtcaaggccaaggttcggttctgtgagatttgtggcaacgtgtgcgagacgagcccttgcccggtgtgcgcggacccgcgccgcgaccgcagcgtgatctgcgtggtcgaggagcctaaggacgtgatgagcatcgagcgcacccgcgaataccgcggcctctaccatgtgctcggcggcgccatcaacccgatggccaacgttggccctgcggatttgcgcatccccggcctgctcaagcgtttggaaggcgatgaggtcaaagaggtgatcatggcgcttgacccgaacatcgaaggcgaagccaccaccagttacctgacccagttgctgcgtccggtaggcgtcaagattacgcgtcttgccagcggtctgccggtcggctccgacctcgaatacgccgacgaaatcaccctcggccgagccctagccggccgccgcgaagcttaagcggcatctctctccttaagagtcttaatttccatatgcggcaattgccgaaccgtcgttgccgtccgctctgcagattgccgttgatcatgggttgcttgcgactaatatgacgattattttggccggcagtaatgaagggtttatggagagcgaggtgcttggccgtaaaagccgattgtatggccgacgcactgcccaaatcaggttgttgccgttcgattacgctgacgcagcgaaatttcttcctaacacgaagtcgcaggatttggttcgttattacgcgacttttggcggtacttcgtactatcttgcgcgtatcaatgaatccgatggattcgaagataacgtacttcgactgttgttcgacaaccttttagcaaatggtggtgtaatgatccgattgcgcgggaacagaccgatattgatgtgattgcggctgattctctgagtaagcagatattgataggcgagtgcaagtggcgtaactcatttaatgagacggaagccgttgagcggctgcgtgggagggccggattaatccgtggttacttgccggagacagctcggtttgtgctgttttcaaaaaatgaggtaggtgaatctatccgaaatcgatactgcgaggatgaacgtatgtcgtttgtgtctgtggacgacatgtatgccggatgattatacggatggtggcaactcgcctactggcttcttgactggctcggcaagcactctcaacgtatcgttggcgctttctccgtcgcggcgatgccagggccagaaagcggcgtgatgcatgatgcgtgcgggcttgtgccgccgcagtagccagatgatgaacagtccagccagcagtatgccgacaccgaccgcgatgccaatggtccgcccgtcgtgcacgtcgcgtgggtcgggggcaggcacaggaatcgagacacggtgcccggaaatcaacagtcggtgcgtgttcacaccgtacggcgtacaggtcatcagcgtgacgcggtcctcgcccggcgcgatgcgcaactttgaggtgtcgtccggcagaatcactgagatgttatccaccttgtatcccaaggtctcgcccatgacttcgatatagaagaagtcgcccttcttcacctcgtccaggcgggtgaacatcatggcctccaccagaccgcggtgtccggtgattaccgaatgagtggacttgccgcccacgggaagcgatgtgccgtagagatgcccggcgccagaggcaagtgcctcctcggaggtgccgtggtaaatcggcaggttgatggattgcttggggactttgatggtgcccatcacaccgttgccggcatccagtagcgattggtattccttgtctttcttggaggctgagtcctcgccgctggcgcgtgacccaccctgcgcggccgagaacggatcggccgcctcgcccaatacgggctgaccggaatcggcaagcttcttgttgtaggcgcgtgcggctttcagcttgtcctctgcctgcgggtagggccatccggccacttgcttggcgctggtagcagcagtggcggccagttcctgactggattggaattgcagagccagcgggaaacaggccacgccgatggcggcgatgagcagaaggatggtgatgatgcgcatcgccagcagattgcgctggaggcggcggcgttcggctgccagatcggagacgtcgacgacctcgttgaacggatcttgggtgaaagtgttgctggctgctgccgcatcggctgctgctgaatcgtttgttgttgtatcgactgctgcgtcggctattgctgcggcggatgcgtcggcgggtgcattagcgcgggaacgggcatgcttgctcttcgggcgtctatgcagaaaagccattttctgtgttccctctccctatgcctgctgccagggtgtgcgcatgcgtgtttgcctgttggctgccccgagtcttgctgtcacgtatgccatcgagtgtacgccatcaatcacataacaattttcgcggtacaaggtactctggagaacctgattgcgcaactccccgttattctctgactgtgtttgctgttctgatggggaggtggggatggatagaggcttctaggcagaatgggtggtgccttaaaccattgccgttttgcgaaggagcctccgatgtccaagagcaccaatgtcagtgtttccacgagtccgcagtgcgcgagggcgtggcgcagactggagcggtcgttcagggacaggcggggagatgctgccgtcgatggtgcgcagtctggtcgacgcgtgggacgagtccggcagggcgatcggcgaggccggtgacgcgctggacctcgaatcgcgttccgtcgcgccgttcacccgcctgtccctggacggcgttgggcgccgggctgtcggcccgcgacgacgagatcttcagatcgcgcgaccatgcgctgaaggtgacgggccgggctccgaagcggctgccggcgatcgcagggacggttgagttccgcgtgcgccgctaccgggactcggacggggtgccgcgctatctgcccctcgggtgacagcatcggcttgggcgaggcgcctgaggcgtcgtcttcttgcggtggcccttccgagtgaatgggatgttggtccggcatggtatgtcctttctcgctgaggattggacggcaacgatgttgaatgtaatttttgtacattcaatgtactaatttttgtacattcaatgcgcaaaattgatgggttcagaatcggaatcaaaaatgggcgcaatcactttcgtgacttcgccctacaaaaaatggaattctatgcagcgttggtcagacgataccgctggtacttgctcttgggcttgtccgggagcgtcaatgacagtttcccggcctcgaccatcggccgaatgtactctcgtcgcgtatattgcaggcttcggcccacatgatttgcgatttcctgcgccaatcgcggttcggcgcaatacgcaagaatagtattttcgacgtcggccgggcgcgggctgttcttgtcttggccgggcgtggcgtcatggtcgctagcattcgtttccgcgctgctgttgaagaaccgtacgaggaatgaacctctctggtcgataaattccggctgccggactccgtgtgtcctagcctcatcccgaataacggggattcccgagtggcgattttccgcgattttctcaatttccaaaattgaaactagcgtgggatttcgcgtcggcatattggcgtagcccaaatcgttgatgctttggccgccgtatacgccgcccggattccaacattccagccgatccgaaaacataacaagtcggatgggcgtgccgttgcagtatgggccataatcgcggtgcatgagagcattagtgattatttctcgtaccgcggtttccggatattcggggatgtcggtgcgttttccgtcgcgaatcacgactctcgttttcccgttgcgggcaacgaaccccagcgcgccttcgagcatctctgcgatagtgccctcgtaccgcttgttgtcgatgaagcgttctccaccgtcatcgggctgcaaaacagtgccagtgactgcaatagcggtaatgcaaaggttggggtagatgcgttgcgggtaatcgccgagcgtcatcattccggcaagcgtcggcttattgttttgcatggccccggtcaaagacagaatctcatcgtccgagcggcgggggagtagcctcaaagaacacccggcggaatcctgaatgtttgcaggttgcgggttcaccgtcgtggtgcgacagggcggcatatcggttcagtggcacagcggtttagcggtggctatgcggcgccgccgaacatcgggtgtgcgggcggtgtacggcggaagcgcgcgggagcataatcgccaaggctattacggtgtccatatgccggcgatggttcgcttcgcgaacgcggcaacttttataatcgttgcgtttgcgtagaataatcggcaaatactcccaagagaagaacaaaggacagcagtggctctcatcgtgcagaagtacggcggctcgtcggtcgccgataccgaatcgatcaaacgtgtggccaagcgcgttgtcgagacggagaagaagggcaacaaagtggccgtggtggtctctgccatgggcgacaccaccgacgacctcatcgatcaggccctcagcatcgactccaacccgcccgagcgcgagatggacatgcttatgaccgctggcgagcgaatttccatgagcctgctcgccatggccattcacgccgaaggcagccgtgcgcactccttcaccggtcagcaggccggcttcctcaccgacgcccgttacggcgcggcccatatcaaggccgtcaagccggatcgtgtgaagaacgcgctatcgctgggagacattgccatcgtcgccggcttccagggcatcaacgccaagggcgatgccaccacgctcggccgtggcggttccgacacctccgccgtggcgctcgccgtggcccttggtgccgacgtttgcgagatttacaccgacgtggacggcatcttcaccgccgacccgcgcatcgtgacctccgctcgtcgcattccttccatcggctacgaagccattctggaaatggcctcctgcggttccaaggtgctggcgctgcgctgcgtggaatacgctcagcgcttcaacatgccgctgcacgtgcgctcctcgttctcccgccgccctggcacattggtggtgcctgacggtgtggatccgcgcacgctgccgaacatcgactgagcgagaccgaaccgaacccgaataaccgacaaaatcgttagcaatatcaagcaagacaaggcaagacatgactgaagaagaagcgaaatccatgggcgacctgttccccgacctgggtcctgaagctccggtgatttccggcatcgcccacgaccgttctgaggcgctggccaccgtgcgcggcgtgccgaacgagccgggcatggccgccaaggtgtttaccgagctggccaccgccggcgtgaatgtggacatgattgtgcaggccggtgcgtccgtgggtactgcggacatctccttcactgtgccggaggccgccgtcaagcaggtgcagaacacgctgctcgacaagcaggacgtgctgggctaccactccttcgatgtgaataccaacgttggcaaggtggccgtggtgggcgtcggcatgaagactcactccggtctggccgccaagttcttccaggccctgagcgatgaggacattaacgtgctgatgatttccacttccgagattcgtatcgccgcgcttgtgccgctcgaccagctgaacgacgccgtcaaggcgctgcacaccgcctatggcctcgatgccgaccagattgaggccgtggtgtacggcggaaccggtcgctgagccgcgatacgtgcattaaatccgatgaaagccctcctcgcggagggctttctcggtttcgaggggcggatttggcctcttcctgacgtctacttccatttcgaggggctcctcgaatgcgaaactccaagtataaacggcattgcagcaacatcatttcgctattattgagccacggctacttgcccatcagccccttggagcggtagtagacgtccggagaaagctaaatcagcccctcgaaacgcgatttggtgctgaaacacgatgcgagagacttttttgggtggggaaaagtcaggaaagcatatgcgatagttggcttcaacgcaagagcccgttatttcgtcgcgcgagcgacgaaataacgggctcttctgcaaagcagtatggcagctacttcttggtgatgtagccgagggccttgagcatttcggcgcactcgagggcgccgccggcggcaccgcgcagggtgttgtgggccaggcccacgaacttccaatcgaagatggagtcctcgcgcagacggccgatggaaacgcccatgccgccctcgtaatccacgtcaagcttgacctgcgggcggtcctcctcagtgaggtactggatgaagtgcttcggcgcgtgcggcaggccgagctcggacgccttggaggtgtagttcaccagacgatcaatgagctcttccttggtggccttcttgccgaagttcaggaacacggtggcggtgtggccgttgagcacgggcacgcggatacactgggacgtgatcttgaggtcgccgtcgaacggcacaatcttgcccttgtcggcgtccacatggccgaacaccttgagcggttccttctcgctctttgcttcctcgccggaaatgaacgggatgatgttgcccaccatctcaggccaatcctggaaggtcttgcccgcgccggaaatcgcctgataggtgctgacgaccacctcgcgtggctcgaattccttccacgcggccagcgccggagtgtaggcctgaatcgagcagttcggcttgacggcgatgaaaccgcgtgtggtgccaaggcgcttgcgctggtgctcgatcaccgcgaagtgttcggggttgatctccggcaccaccatcggcacgtccggggtccagcggtgggcgctgttgttggataccaccggggtctcggtcttggcataacgctcttcgatggcgcgaatctcgtccttaggcatgttcaccgcggagaacatgaagtccacgttcgcggccacggactcggcgtcgtcgccgtccgcaaccaccatgtgcttggcgtattcgggcatcggcgtttccatcttccaacggctgccgacggcctcctcatacgtcttgccggcgctgtgtgcggaagcggcaagcgtgaccacttcgaaccacgggtggttttccagcagcgtgatgaaacgctggccgaccataccggtggcgccgagaatgccgacctttatcttttcggacatgatgacctctatgaccttcgggtttcgatgggctgatacgttcaagcgaccgtcttgcaatgaccgcaaacacacggtaattgtacgaaacatgcagaacaacagtggccgtcttcccatatggtggctcggcggcgccccccatggcgtaccccgcgccgcgcagctcgatatcctctccacaactggcaaagtgactagcgaagagacggcagtgttctacactggtagccatgtctattgcatcagtagaggcgcaaaagcaactcgaccgtatcgtggccctcggctacccggacgtggcggatatgagtgccgccgcattccgcgcgcttgccgagccgctcatcggcgcgctcgagcattccgatctcggctcgaacatcctactggtgcctacgcgcgagctagtctcgcccgaatcgctgattgcgcgaacctccatcaaccgcatggccggctttaccaccatgcctccgcgagacatcgccagcttcctgccgcaagacggattcatgccgcccgaaggcccgttctatctggtggtcgatccgcataccggcacctgctacatcaaccgcgagcccgacgtggcccgcaagctgattgattccgacgaacgtctgccgctcaccctcgaagaaggcttggccatcgccacccagcaccctgaatggctgttggaaaagaacggtttcaacctgcttggctcgcgcagcgcggacgggcgcgtgccgagcatctggatgagtcagaacgcgccgaggctcggcgccgtgtggccgaattccaagcacacgtggctcggcaacgcgttctgcatggcccgccgcggggtgtcgctgttccgatagggccggtgggccaaaattcggtgctatccttcctagggcagatggggcgttttgcggacatctactcgcctttctgagggcagtcgcatcggcgcgtgggggcgctccgccgttggaatatggcgcaatatgaggggccgatgcccgtggcgcgcccgttgaggtgccctcggaaggcggagtagatgtccgcagcggcggaaatccgccctcggaaagccaagtggcggtcgaagcgcgggccgacggaacacgctcgttgcgcggcgttaacagattggacatcagacgtctgatgatagtagaatagaaatgctcaggcaccggcatttcaaggaggaaaccagcatgccatcattcgtcgtcggcgcgtacgcgtcattgccccaggggcgcgaagcccaggaaacctactacgacctgctcggcgagcagccgtggatcgagggcaccgagctgcccttccccggcgacctcgcggacaccgccgaccgcatctggctggccggccacctgcccaagcactggcgcggcaacaccgtcaccgtcatccccggcaccatgcagcacgtgtggaaggacccgaacttcggcctcgccagcccggacgaggacgggcgcaaggtcgcgctcgcgttcatgaagcagctgcgcgaggcgctcgccgacttcgcccagtggagggccagccaggacgtcaagttcatcgaaatccactccgcacccacgaggatcgccagccgcgacgccatggccgcctcgctcgaggccctcacgcagctggattggtccggtgccaagctggtgatcgagcactgcgacaagtacgtcgaggggcagaagccggaaaagggcttcctgtcgattgaggacgagatcgcgctgtgcgggtcggccggcattgggctcaccgtcaactggggacgctcggtggtggaggggcgcacgcccgaaaccgccgtggcgcacgtggaggccgccgcgaaggccggcgtgctgagcggcctcatgttctccggcgccggcccggaggagacccagtacggctacggctggatcgacggccacctgcccatgaacccggacgagccgacctcgctcatggacgccgccgccatcaaggccgccgtgcgcgccgccgggacgcaggagcgcccgctcgactatctgggcgccaaggtgtgcgtgcccaaggacgcgacggtcgaggagcgcctcgactatctcgcgcgcatccacgaggcggtcgtcgcatgagcgcgggggcggcgcccacctacctcgccttcgacatcggcggcaccaaggtcgcctcgggattcgtgacgttgccgcgcaaacgcaaacgcgggcgcggacggcaggcccgaggtgacggcccgctgtgaaatcccgaccgaggccgcgcgcggcggcgaggacctgaagaaccgcatcgtcgccttcgccgtccgccagcttgagcgcgccgaggccgagggcgtggcgatcgccggcgtcggcatcgcggcggcgggcgtgccggacagcgaaactggcgagatcgtctccgccacggacatcctgcccggctggcgcggccagcgcatctacgacgcgttcgcggccgtgaccgacctgccagtgcacatgatcggcgacgtgggcgcgcacggtctgggcgaggcgacgtacggcaccggacgcggcaggggcgtagtgctctcgatcggcgtgggcaccggcatcggcggcgcgatcgtggtggatggcgccctgttcaccggcgcgcacggcgtggccggccacgcagggcacgtgccgagcgcgctgggccgcggattcctatgctcgtgcggcaccctcgaggggcacatcgagccggtcgcgtccggcacggggctgaaggacctctacaatcggcgctgcgaggaggccggcgacgagaacctcccggctgcggacggcgccgaggtggccgcccgcgcggccgcgggggaggagctagcccgccgcacgctcaccgacagcgcccgtgcgctcggcgaatgcgtcggcggcatgggcaacctcatcgacccggacgtgatcgtggtctccggctcggtcgtcaaggccggtccgatctggtgggacgccctgcgcgccgggttcgccgattcggcgctcgcgctcgtcaagccgacgccgctcgtcgagggcgagctcggaggggcggcgccgctgatcggcgcggcggcggctgtccaccggcgcatcggcgcgccggacgacgcgcgatagacaagatacgacaacaggaaggaaccagcatgcatcaggcaatcgagaagatcaggggcggcctcgtggtgagctgccaggcgtacccgggcgagccgctgcgccacccggagaccatggcgcagatggccatggcggccgtggagggcggggccgtgggcatccgctgccagggcctcgcggacatcgcggccatcaagggccaggtgagcgtgccggtgatcggcatctggaaggacggcgaggagggcgtgtacatcacgccgaccctgcgccacgcccgctgctgcgccgccgccggagcggacatcatcgcgatcgacgcgaccggacgcccgcgaccggacgggctgacctacgccgagaccgtgcgcgccctgcacgacgagggcgtgatcgtgatggccgactgcggcagcttcgccgacgccgagcgcgccgtggaggccggcaccgacatcatctccaccacgctgtccggctacaccggcgagcgccccaagaccgacggtccagacttcgagctgctcggccagatgatcgaggcgttcccggacgtgcccgtgctgtgcgagggtcgcatccacacgcccgaccaactgcatcaggtcatggccgccggcgcgtgggccgcggtggtgggcacggcgatcacgcatccgacgaccatcacgcgctggttcgaggcgaagctgtgagcggggcggggcgcatactcagcttcattgcagcgggcgatccgaatcgtccccttgtcgtcctgctgcacggcgtgtgcgacgcggcgattgcctggtccgactacatcgactatctcagtcatgattttcgcgtggttgcggtcgatatgctggggcatggcctgtcgccgcgatatgccgatgctcaactccgacatccattcgaatccgcgtatgaggcgtttgaggagaccgttgaatatcttgaacacgtccacggtggcagggcgatcatgatcgggcattccatgggaggtgcgattgtgacgatgctggtcaggcgtcgtcctgatctttgcctcggtgcagtggtcgaggatcccgcatggctgaacgatgagcagcgacagcggtatgtggacaacgcgccggccaatgcggcgttgctgcacgactgggcatccgacccggccaacgcgatccgtcacaatcagacgcgtcgtccgaattggccgatggaggatcatatcggctgggcctatgggcagaaccgatgtgatccgcgattggagctcaccggcgtggtcagcttcgcggaggactggcatcaggtggtgtcctcgatagaggtgcccttggtggtggtctcgtccgacgatccctcagatctcgtgggtgtgcgcgggctggaggaagtcagggcaatggggaagccgaaccttgaaacggttttcattcccgggtgtgagcacggtctgcgcaggactgacattgccgcgttcaatcaggcggttacgcccatactgcaccgctgggccgcatgtgaatctcatgtttccggcgaaatataagatgtctgatgtcttaacactgtcgttaccgcggtttgagaccgttgcattgcaaggaaaaaacgtggtagctgcactcataaaacgtctgatgaaacttgcaatcagacatcagatgtcatatgattaagaaagattcgattggatggagaatcgaatcctgattcagttatcactcaacgaagaggagaaaccgatgtactcgtggaagacccgaatggccaagaccgccgctgcggtattggccggcgcgctcgccttgagcggctgcggtggaggaaccggcacgacgaacgccaaggggggtccctccgtcgcggacaccatcaccgcgcaggtggcgtacagcagccgtgacttcaatccgctgtccacgtccatggccctgccgatggccggcaactggcatgtgaccgaggcgctgtacacgctgcagatgtccgactattcgttggtctccggcttggctgccggcgaaccggagaagatctccgacaccgaatacgtcatcacgatccgcgatggcgccaagttctcggacggtaacgccgtgaccgccaacgacgtcaagacttcgttcgagcgcgtcatggcgcccggcggcgtttacgctccgatgctctcgttcattgactcgatcaccgcgcagggcgacaacaagattgacttcaagctcaagtacgcgttcaccctgttcaaggagcgcatgtcgctggtacacatcgttccggccagtcagagcgacgcggacctcaagaagatgccgatcggctccggtccgtggaagtacgtcgagatcaccgatcagcaggtgaagttcgacaagaacgaatattacaacggcgaattccccgcgcaggtctcccacatggtgtggaacgtgaatgtggatgacaccgcccgcgtcaccgccatgcagaacggcaagagcgacatcatggagaacgtccccgccaaggcgttcgacaccctgaaggccgccggcgccgacatcgagacggtggatggcttcaatcaggcgttcatcatgttcaacaccaagcagaagccgttcgacgacaagcgcgtgcgtcaggccgtgttctatgcgatcgacaccgagagcatgatcaagaaccagctgtccggcgaggccaacatggtcaccggcttcatgcccgagagcttcaaggcctatcacaaggcctccaacgtgtatacctacaaccctgagaaggccaaggagctgctcaaggaggctggtgtgtccgaaggcgtgaagttcacgctctacaccacggatcagacttggatcacccagctggcgccgcagatcaagaacaacctcgacgcgatcggcttcaacgtggacattcagtccatgaagtcctccgccctgttcccgaccatcaccgataaggacgacgccgacttctccatggtgcttggccccggcgatccgaccgtgttcggcaacgatcccgacgtgctgctcaactggtggttcggcgacaccgtctggaccaagcagcgcatgttctggaacggctccgacggatacaacaagctgcatgagctcatggacaaggccgcccggtcctccggcgacgaacagcagagctactggaacgagtgcttcgacctgctctccgacgagctgccgatgtacccgctgttccaccgcaagctttccaccgccgtcaagaagaacgtgttcagctcctacaccccgattggaaccactggcctgtacttcctgaactccaagctgaacggctgatccacacaagtcattcgccatcacatcccgagggcgctgccgcgcaagcagcgatgctgacgcggcgacgcccttattttgcgcaaccatccatctgaggagtatatagagtgggcaatttacttcgtttgttgggaagacgattgatatccctgccgtttgtggcattcggcgtcgttttcctcgtgttcttcctgatgtcgttctcccaatacgaccccgcggtctcggctctcggcgaaaatgccacggctgagcagcttgcggcataccgccacgagatgggcttcgaccgatcgtggggcgagcagttcctgtcgtatctcggcggcctgttccaaggcaacctcggcgtatacggcgtgaacaaggattccgtgtcttcccgcatcgcgactgctttcccgatcacgttgcagctgacgttcatcgcgctgatcatcgccgtggtgttttcggtgattttcggtgtgctcgccgccctttaccgtgacacgtgggtcgatcaggtcatccgtgtgatttccatcatcgccatcgctaccccgtctttctggctgggcgtgctgctgatttacctgctgcagatcaagctggccctgctgccgggtgcgggtgagctcgtgccgttcagcgtggatcccggtgaatatctggcgcgaatggccatgcccgcgttctcgctgggcttccctgtcgccggacagatgacccgcatcatccgaacctccatggtcgaggaactggataaggactatgtacgcaccgccatcggcgccggcgtgcccaagcgcgtcgtcattgcgcgcaacgtgttccgcaacgccctgattactccggtcacggtgcttggtatgaagatcggctacctcatgggcggcgccatcatcaccgagatcatcttctccctgcccggcatgggcacggcgctgttcgaaggcatcaacggcaacgagccgattctcgttcagggtgtggtgctggtggtggctctcgcgttcgtgatcatcaacatcatcgttgacatgctgtacgtgcttatcaacccgagaatcaggacggtgtgacatgctgtttggcaaacccaaagtcgtggacgcggtgtcgcgtcccggagtgaaattcaaccgtttcagcaaaatgaccattggatccaggctcgcgttgctgtttatcgcgctgctggtcgtcgtggccgtcgccgcgccggtgatctcgccggaggatcctctcgccattaccgtgagctatcagtctccgaccgccgagcacctgttcggcaccgataacgttgggcgcgacgtgatgacccgcgtgttctacggcgcacggtattcgctcgtcatcggcctgctgtccatcctgttcgccttggtgctgggcgcgctcatcggcgcgatcgcggccgtggcccgcacgtggatctcggaaatcatcatgcgcgtcatcgacgtgttcatgtccgtgccgggcatcgccctcgccgccgtgttcgtctcgattctcggccagtccatgttcggcatcatcgcagccatcggcatcctgtacgtgccgcagatcgcccgcatcgtgcgcgcgaacatcatcagcgagtacggcaaggactacgtgcgcgcggtcatcgtctccggcgcccgcgccccgtggattctctacaagcatgtgatgcgcaacatagccgccccggttatggtgttcaccaccctgtgcgtcgccgacgcgatcgtgttcgaggcgtccctgtccttcattaatctgggcattccggagccgaccccgacgtggggcaacatcctgtcctccgccaaggaaggcgtgatcttcggctactggtggcaggcgctgttcccgggcctgatgatcatgatcaccgtgctgtgcctcaacatcctgtccgagggcatcaccgacgccatggtggccgctccgaccgcgccgatcaaggaaaccgacgaagacaaggaagccaagcgtgaggaggatcgtctgctcgtcgatccagtcgccgcctacgccgcccagcgcgagagcctggaggaatcccttgccgagctgcgcgaggccgaaatgaagcgcaccgaccgcttcgagcccaagagcaccgagccgccggtcatcgaggtcaaggatttgtgcatcaagttcccgcgccacggcgacgtgaacgtggtggaccacgtgagcttctctgtgcgtcccggcgagaccatgggcctcgtgggcgagtccggctgcggcaagtccatcacctcgctggccatcatgggcctgctagacccaaaggccgagatcagcggcgagatcctgttcgacggcaagaacctcgtcggcatggatcccaaggagcacaacgccctacgcggccacgagatcgccatgatctatcaggacgctctctcctcgctcaacccgtccatgctcatcaaggcgcagatgaagcagctcacctcccgcggcggcacccgcagcgccgaggaactgctcaagctcgtgggcctcgatccggagcgcacgctggagtcctacccgcacgagctgtccggcggccagcgccagcgcgtgctcatcgccatggccctgacccgcgacccgaagctggtcgtcgccgacgagcccaccacagccctcgacgtgaccgtgcagaagcaggtcatcgacctgctcaacgagctgcgcgagaagctcggcttcgcgatgatcttcgtctcccacgacctcgccctcgtggccaaggtggcacactccatcaccgtcatgtacgctggccaggtcgtcgagcagggctccaccaaggagatcctcaccgacccccgccacgagtacacccgcggcctgctcggtgccgtcacctccatcgaggccggcgccggaaggctccaccaggtgcccggcaccgtgccgtccccggcggacttcccgaagggcgaccgcttcgcgccgcgctccagccatccgacggtgggccttaacacccgcccgatcttcaagcaggtgcccggcacgtaccacttctacgcggccctgcccgacgacgcggacgtcacgcccgccgctgacgccccgacagccatcagcaaggaaggaggtgcccgatgagcaaggatccgaacgtgccgatcatcgagctcaaggacgtcgaggtggtcttcaccacccgagccggctcaattctgcatccaaacaaggtcaaggcagtcaacaaggtgaatctgcgcctgatgccgggcaagaccatcggcatcgttggcgagtccggctgcggcaagtccactacggccaacgtgatgtgcggcctgcagcaggccacctccggccaggtgctgttcaagggccaggacgtgacccaccgcaccgccaaggagcgcatggagatcggtcgcgtggtgtccgtggtcttccaggacccggccaccgcgctgaatgcccgcatgagcgtcatcgaccagctcatcgacccgctcgtcgtgcacaagctcggcgacaaggcgagccgagacaagcacgcccacgaattgctgcggatggtgggattgccggagtccgctctgtacgcattgccgggccagctctccggcggccagcgtcagcgcgtcgccatcgcccgcgccctgtcgctcaatccggatgcgatcatcgccgacgagccgacctccgcgctggacgtgtccgtgcgcgcgcagatcctcaacctgttgtcggatctcaagaagtcgctgggtttgtccttggtgttcatcagccatgacatccagaccgtccgctatgtgtccgacgaaatcgtggtgatgaaccacggaaccattgtggagcgcggagcggcttacgacgtgctgaacaatccgcaggattcgtacaccaagctgctgctgggcgccgcgccctcgctgctgcacccgaccgcggaggaatgtcggtaagccgacgattcaccgtttcgccattccgccgttggccgccttcaacggggccgacggcaatggccgaccattatccgaataacttgattttgtaaaggaaccaccatcatgacaacacaattccgcggggtcatccccccggtcgtcaccccgctcaccgccgacggcgaagtcgacaaggtcagcttcgcgcgctcgctcaaccgcatgatcgacgctggcgtcgatggcctgttcacgctcggctcctccggcgaggtcgcgttcagcaccgacgcccgccgccgcgagatcatccagaccgtcatggagattgtcgacggccgcgtgcccgtgttcgtcggctgcatcgacaccgagaccaaccgtgtgatcgagcacgccaaggaggcgaaggagctcggcgcgtccgcgatcgtggccacctgcccgttctacgcgctcggcggcctgccggagatcgagcgccacttccgcctcatccacgaggccgtgcccgagctgccgctgttcgcctacgacatccccgtgtgcgtgcacaccaagctgcctggcggcctgctcgtcaagcttggccaggagggcgtgctcgccggcgtgaaggactcctccaacgacgacgtggccttccgcttcctcgtggacgacaacgccaaggccggccacccgctcacgctgctcaccggccaagaggtcgtggtggacggcgcctacatggccggcgccgacggctccgtgccgggactcgccaacgtggaggccaccggctacgtgcgcatgtggaaggccaccgaggccggcgactgggccaccgtcaagaaggagcaggactggctggccgcgctcatgcgcatcgtcaccgtgccgcagggcgtcgcgggcttcggctccggcgtgggcgcgttcaagaccgccatggcgctgctcggcgtgttcgacaccaaccagatgcccaacccggtcctgccgctcaagggcgagaacgtcaagcgcatcgccgccgtgctcgaggagtgcggcatgacgctcgcccgcacgcccgaggaagtctccgcctccaccgaggcctgacgtcaaggtctgaaaggaaaacaccatggcagaagtcatcatcgtcaagaaccaggaggaggccggagagctgtacggacgctcggtcgcggacctcatcaaggccaagccgaacgcggtgctgggactcgccaccggctccagcccgctggccgcctaccaggcgcttgccgagatcgtcaaggaggagtcgatcgacgtctcccaggtgcagggcttcgcgctggacgagtacatcggcctgccgctgacccacccagagtcctaccacgcgaccatccaccgcacggtcgtcgagcccctggggctcgacccggccaaggttcacgtgcccggcgacgtgctcaacggcaccccgctcgaggacggcgagaaggtcgcgggcgccggcgccgcctacgacgcggcgatcgaggccgcgggcggcatcgacgtgcagattctcggcatcggtaccgacggccatgtgggcttcaacgagcccggctcgtcgctcgcctccggcacgcgcgtcaagacgctcaccgaacggacccgcatcgacaacgcgcgcttcttcgacaacgacatcaaccaggtgcccacgcactgcatcacgcagggcatcggcacgatcatgaaggcccgccacctcgtgctgctcgcgttcggcgcgggcaaggccgaggcggtcgcggagaccgtggagggcggcatcagctcgttctgcccggcctcggcgctccagatgcacccgcacgccacaatcatcgtggacgaggaggccgccagccgcctgcgcaacaaggactactaccggtactcgttcgagcacaagccggcctggcagacgatctgaccgcacgtggtcccggttcccttcgttgggaccgggaccacggcgttacatctgaaggaaggcaatatgaccgaaactcgtgaacaggtcgtcgctcgcgtgacggcggccgtggaaggcgcggcggacggcgcgttcggcttcgaccggccgaacccggtcaccggcgcgccgctgggcctcgtcgcccccggccgcgccgccgacctgctgatcaccgacccgggcacgctggcggtgaagcacgtctggtgcgccggccgccgcgtgagctgagcgggctgggccggacggtttgaccggacggtccgcccgctggattgcttgcaacgatgcaggatagttaaacaggaaacgtaatacgaaaggtactcccatgtcgcatattcccaatcaaatccaccagacatggaacagtgcgctgcttccggaacaggggggaacgctgcatgcggcgttccacgtcgccacggacggcatgctgctggaagcgcgaaacgccgaacgcgtcgcgctggcggtcacggtttcccgcgggtcgctggtcgtcgaagcgcccgaagaccatattgtgctggacgtcgaagacacctacggcgtgcagttcggcggtgtccacgaccttcatatcaccttcggcgattttggcacgcgaatctatctggatggctatcaggccttcgcctgcgcgaccaacatttgcccgtcgaagtatgcgcaggctggcgtcttccactgcgccaatgaagcgcatatcggcgttgagcggctggaatgcttctcggaggcttggacttcggagcgtattcagggcagcgttcccgtgccgcagccggatattgagtttgccgcggcctatttggcggacaaggatgtgaagacgctgcacggcgtgaccgacggcacgatctacgcgcagttccgcgtacgtggcgtcggacagttcggcacgattcttgcggcgcgcgatgacgatcgccagatcatgaacgtggacattgacgatgacggctttgtgtaccgcgctttcgtcaaaggacagtggtgtgagtatcgcgcccacggcgattggaacgatggcgggtggcatgatctggtcatccgcgcattccgcggtgcggtggacatctatgttgatggcaacatggaaacgcatcagcccggtcaggtgttcttcggtgatctcgaggggctgagctacgtgtcgatcggcgaggacacggccggtgtgcggttgtgcggcgaagttcgcggcggcggtctgttcctgtatcctctgggagaagggcagattcgcaaaatctccgacgtgccgcccaccaccgataccgcgttgttcgacaaaggatatgaaggatccgcaagctaccgcatcccgtctttggtgactacgccctccggtgtgacgattgccggtgccgaccaacgtgtggtcatctccaacgatgcccccaatgagatccatttcgttgtccgccgctccttggatagcggacagacgtggctgccgctgcaaaccgtcatcgcctttcccggtgatgggctggatggcgcgagcgtcatcgactcatgcatcgtctgtgatcgtgagacaggccgtgtgacggtcgtcattgaccattttccgggcggtcgaggcttcgccaacgttgaaaagggcttggggttggatgcccgggggcggctcatcctgcacgatggcgagggggcggaatacctgctccaacctgatggtgcggtaacgtccttggacggagaagccacgtcataccgtgtggatgaggatggcaacgtcacacgcgatggtgagtccgcgggcaacatctatctcaaggagggcgtcgacccgcatgaaagcctgctggccgcgcgtaccagctatctggtggaagtgcattcggacgatgacggcgaaacatggtccaagcccaggcacatcaaccatatggtcaaggaaggatggatggggtttctgggcacgtcgcccggcaacggcatccagctgagcgccggcaaacatcgggggcgactgctcatcccgtactattgcaccggcacgagccccaagttcaacgcaggcggcgcgctgatctccgatgatggtggccagacgtggcgcagaggcaaagccatcaacgaggggcgcgtagtcaacggcaaggtcgtggacgaacgggacgtacgcgatgacgatgccaccacgcacgaatcggtgttcgtggaacgggccaacggcgatgtgctgtgcctgttccgcaatcaacatcatctgggcagggtcggcaaggccgttagccatgatggtggtgatacatgggaaaccgttgagttcgatcccgatctgccggacatcttcagccagcccaatgcggtgacggtcccgtccaaagccggcgaggagcccggctgcgcatccgaccggatcgttttcgccaatgccagcctgatgcgtccctaccgtggctgcggtgtgctgcggctgagtgaggatggcggccgcacgtgggcgcgcaatcggtgcttcaatccctatcactatgtctaccagtgcatgtcggtgctgccggatggggccattggcctgtcttgggagcgggaaacggccggagtgtacttcacgcatctgccgctgagctggttcggagtgaagtcggctgcggaggagtgatcctcggctatacgtgacctgcgtacaaaggcgtcttcctggcaactctggaagacgcctttgtacgcagcatgtatattttttgtacattcgatgtacatttttttgtacatcgaatgtacaataattgcatgtccgattacattgcccggcctctggctgaatccatcctgcatgctcgacgcaaggccgtgatcctggaaggggctcgcgccgtaggcaagacgatgatggcccagcgccaactcgtcggcgtcggcttttcgtatgaaacccttgcggataccaacgcatacgaactggcgaaaaccgatctgcatggatggctggagtccttgaacctaccggtgatcatcgatgaggcgcagcgcatccgcgatctgccgctcgccgtgaaggaaatcgtcgatgcgctgcccgccggccatacgcagttcatcctcaccggcagcgcgctcatcaaccgaggtggattggacggccaggatcctctggcccgtcgagcgcagcgtttcaccatgagccccctgactcaacgtgagatgcacggcgttgacaccagcctggtggacgatttatgggatggagagccggacgtctccttcgacgagccgatcgcccgtcagaagctttacgatctcatggccgccggaggcttccccgaatactcgtcgcaatatgccgaatatgcggattgggaacgggaaagacttgtggcggatgacatccgtgccgtgctcggcgacaccattctgcccgatgagaaacttgacgcggccatcgccgaaaatatcctcacgaggcttctgtgcatgcccggaggcattctgaatgccagtgctttgggtgagcagcttgccctcgaccggcgtaccgtagaccgttatgtgggcatcttcatgcggcggtttctggtgggcgcgttgccgaatctgcgtaccgcgcctaaccgtcagaccttcgcccgtgccaaaatccatccggtggatacgtcgctgagcgtacaaaccatgctttccaagggccgcgatcccatggtcaacccggtggattacggcaatctcctcgagtcgttcgtcgtcaaccagattctgccatctgtgcagtggtcccgcattcatcccgattgcttctattggcgcgaatcaggctccggtcccaaggaggtcgatctcgtcatggtaagccgggatcgcattgtcggcgtcgaggtcaagtcctcctcccgggtaacccgtgaggatttcaaagggctggcggcgttggccaacgaccggcggttttaccggggctaccttgtgtatacgggtggccgcgtgatgaaatggccgggtaatctttgggcattgcctgtggcggcgttatggaatcccgacgcatttatagctgcggcggagtgatgcggggctgatggccttccgcccgctccgcatcacgattacccaacttcactcggtacctccctgaatgcgttgctttaggatggactcgatcggctcgtagtggtcgatgacggctttccggtattcctcgacattaccggcgagggccgcgttcaacatgcgcttgtgggcctctgcggtacggtcgagctcgctggacaccggcagacccagttggggaagaaccgccatgtgcacgagccacagggaacggaccatctgcttgacgattgtgttgtccagagaatcgagaatccccatatggaagtcaatgtccaatgcgaggaaggtcttgccttccttggcggtattggtcatggactcggcaagctccatgagacgcggttgttcgctgccggcaagcgatacgaccacttcgccggcgcatcccaagtccagaaacctgcgcagctctacgacatcctgcaggtctgtgaaattcttgccgacagacaccatggatcggaatgcgagcgtttccaccatcggatccaaggacaaagagcccacgaaggtgcccttgccgtgttccactttgacgatgttgagcgcttcgagcttgcgcacggcctcgcgcacggaggagcgggaggctccgatcgtgtcgcacagctgtgtttcagtgggcatcacgtcgccggattgcaggtgctcgcgcaggatgtaggacttgatcgcgtccatcgtctcgtcacagcgactgcgagcggagactgcgggcgtgaccttcaacgacagtcgggccagcaaagccagttcccgttggctgtactctccctgaggggtgaatgattccgcgtttggtgcttccgttgaagctggcggttcaagtacggccgagtcggataggttgctcatgatgtgctccttgtcttgttcgtcctcaagttggtgacgccgttgtcgtgatcaatgattgtgcagttctcaaacggcttttctgtctacaatagtgcgaaacgaaaaggcttgtccgggtttgggtcgttttttaccatagcgctgactttaccggtattgagcatggttgaatggtccggttggccgtgacgcgtatggcatgctccgaggttccttgacttgttgttgcgataactccgcattgagtcatcaggcatctgacaacttccatcgtatcatacgcatggtggcggcatgcgggccgttcggtggtctttttccatgcagagtttcgcatggctgtgggctatctgcggagtgtgcagcagattcgggaagtcgtggataggtgtccgcaaaggcgaaaaagttctgcacactatggagatggcacggtcggttgtgcgccgcggccgtcgtaaggagacgacgtcgtgcgaatttgcggggagattcctagtgtcgcacttcacgatctgtattttttgtacatgcgatgtacaaaaaatgcgcaagcgaatgtatcacgcggccgctggttcaggcattccatataccccgacgattacgtttctatggcggctctggtgtgtaccggccgccacgtcgtgaaatggccggaattccgggcgtttcacgactgacattcctcacgctgccacgtttttcgcgggttccagggccatgttcgtatcgtttttccttgttttccctgtggatttgtcacgttttgcgcgggttttgcacccgctgctgccacatttttccattttgcggatgcatgcgggttcatgtgggtgcatatggaggcgtgcgggcacttattggcgcttgcgggcggtcgcggctttcaccgcggagcccaccgcggacgccaccgcggagacggccatgccggcgagcagcgcgagggtggcgaagacgcccggtcggcgcagctggtcgcgcagggtggggccgtccaccaccaggtggtcgccgatgaagacgcgcgcctcattgtggccgtagcgctccacgaggtcgccgtaggtgagcatgcgcgtggcgtaagcggacgggtcggattcgcggaattcgaacaggcggatgccgcgcaggcgcgacttggggccgtacgaggcgaagccgcaggtgggggcgtagccgaggtcgagcccgtccacgtgacccacgaacgcgttcttgtggtcgtggccgcagtagagcgcgaagtagccgcccgcgtcgcgcaatgccgccacctcgccgcaattcacgtccgcgcatccgatcgattcgccgaggatcgaacccggccggcataccgagcggttcagcacgtagcagcgaccggcgaacgtgcgcgcgccctcgacggcgttgggcgtgaggggcggcacctccttgaggcactggtagaactcctgcggcgggatgtgctggaacgcgatcgcgggcacgggccgcccgtcgccgttgcgttcggccagagagcgctgcacgccgccgagccacgccagggcctgcggggtgggcgtgccatagccgtccgagtcggccagatcgagcccgcgcgggtcgcgcgcgtattcggcgggcgcgaggtgcgacgacggctcgtcgtccacggtgtcgtcgggggagagtcgctcggtggcgtagtcgcccgaattgaccatcacgacgctcatggccacgcggcccgacccgtcggacgcctcgacgggcagtgcgaacgtgccgggctcgcagacgagcgggttgtcaccgtccgcgtcgtgctccccggggtcgcgcgggttgaggcagccggggaactcgcggtagatgccgtcctgttcgccggcgaggatgccgcactggaagtcgtggttgccgtaggtggcggcgaacgggacgcccgcgtgcacgaccggcccgaggaatccggcgaagcaccggcgcaccttggcgcgcgcgtcgtcgagcagcgcgtccacggcgtcgtccggcacctcggactcgggcggatcgggcagccgcgccccgtcgaacgtgcggcgccaccacgcctcgaaccgcgtcacctcgcgcacgtggtcgccgggccgctccccgcgccggcgcaggaacgtgcgcatccacgccggatcgtacccgcggatctgatcgccggtgaacaccaccagatcgggtttggcctcgcggatcgccgcctcgatgagcgccacggtgtccggatccacgtccggcccgtcctgcacgtccgccatctgcagcacccggaaggtgccgtccccatgtccgtccccacggaagcgcaaagtcgtcatacggcccactctaacccatccgcaatccaaccgcccggtatggcgattgggatctgtgacgccggcacgccgccgcgtaaccgctatgtggcatgggcgcggcgttgggatgctggaacggtacgatggaagttcgttacggatatgtaacgcagtgatagaggagcgcgtcgactgcccggcattcccgccggccgaaggggcgcgccgattccaagcaaaggaggagtaatgggtcaggatcaatcatccgtttttgatctcgcggccgtggccgcggcgtccaatggggggaacaacgacccgctgctgcctccggcacgattcatcggcgatccgcagaagcccagccgtatgccgtacaacaagtacgcctcatacagcgagcagatcccgtttgattacccggagcgcacgtggccgggcaagcgactgcagcgtgcaccgcgctggtgctccgtcgaccttcgcgacggcaaccaggccctcgtcaacccgatggattccgagcgcaagctgcgcttctggaacctgctcgtctccatgggattcaaggagatcgaggtgggcttcccgtccgcatccgagactgatttcgaattcatccgcatgctcatcgagcgcgagctcatcccggacgacgtgactatcgtggtgctcacccagtgccgcgagcacctcatccgccgcacctacgaggcgctcaagggcgccaagcgcgccatcgtgcacttctacaactccgtgtccgtgctgcagcgcgaagtggtgttcaagaagaacaaggaagagatcaagaaactcgccaccgatgccgctgaactatgcaaggacctcgaatccgaggccaagggcatcgacctgtactacgagtactcgccggaatccttcaccggaaccgagccggagtacgccgttgaggtgtgcaacgccgtgatcggcgtcatcaagccgactcccgagcatccgatgatcatcaatctgcccgccaccgtggaaatgaccacgccgaacgtgttcgccgacgaagtggagtacgtctccacccacctcgacgaccgtgattccgtggtgctctccctccacccgcacaacgacgaaggcatgggcgtggccgccaccgagctggccgtgctggccggcgccgaccgcgtggaaggctgcctgctgggcaacggtgagcgcaccggcaacgttgacctggtcacgctgggcctcaactggctcacccagggcatcgacccgcaactcgacctgtccaacgtacctgagatccgcaagacggttgagtactgcaaccagatcaagatttccgagcgccatccgtacgccggcaacttcgtgttcaccgcgttctccggctcgcatcaggacgccatcaagaagggtctcgaggcccgtcaggtggccgccgagcgcgccggcgccgatctcgacagcttcgtctggctcgtgccctacctgccgatcgatccgaaggacatcggtcgcacctacgaggccatcatccgcgtcaactcgcagtccggcaagggcggcatggcatacctgctcaagaccaaccacaaccttgacctgccgaagcgcctgcagatcgaattcgacaagatcgttcagaacttcgccgacaccaccaagaaggaagtcaaggacgaggacatctggcgcttgttcaaggatgagtacctgccggtcgaacagtctggcatgaccgccgccggcgtggtggtgggcgatacccacgacgcttcgcttgcgccttggggccgcctgaagctgctcaaggtgtccgtcagctccggtgaggacggttccgacaccgtgctcaaggctcgcctgctcgaccgcggcgtgaacgttgggggcgagcagcccgtggagcgcgaggtgtccggcatcggcaacggtccgatcgccgccttcctcaacgccatctccaacttcggcgtggacgcctcgattatggactatgtggagcacaccatgtccgtgggtaccgacgccatggccgcctcctatgtggaatgccaggtcggtgaggctgacgacgcgcagatcgtgtggggcgtgggcattgactcgtccattaccaccagcgcgctgaaggcgattatctccgccatcaaccgttcccagcgcaaccgctgaggccgctgagtcgcacatatagtattggctcccctctctgaggggagccaatactattgggtctctccctcagtcagcttcgctaacggctccctcatcagagggagccgttgctgccatcagagggagctgtgctgcggctcttactgctgctggaattacggctgctgcgggtcgggcttgggcttctgctcgtcgtcgggagtgggggtcgtgtcgccggtgtcgccgtccccgccactgctggtacccggataattcgggcattcggtggaatagctcgggttggcaaggcactgctgggcgaattcctgcttctgctgggcctcggcatcagcctgcttcttggcttcttcctcggccttccgcttggcttcttcctcggcctgcttcttggcctcttcgtcatcggtggtggaagaagaggatctctggccgccgcccaagccccacgtgccgtcggagccaccaatcttgccgctgtccttaggcgtggtgaactgctcaacggcggtgccctgcagcgcctgagtcatgtattcctcgaataggtgcgccgggtagccggtggaggtgacgccgtagccgccgaatgccggcacaacctgcgggttgccgtccgcatccggattccaaatggcccatacgttcaacaggctgggcgtgtaacccacgaacgatgccgccagctcatcgttggcggtaccggacttgccggccacttggcggccgcccagcgcgctggacacgccagcggcggtgccgtaggtggtggtgccctgcatggccttctgcaccagcgcgcaatcgttggcgtcgaacacctgcttgttctcgttaggtgcgttgtagaggtccttattatcggagctcagcaccttgttcaccatgtgcagggtgttcttcacgccattgttggcgatggtcgaatgcccctgcgccagatcccacacggtcagcgcgttgatgcccagcacgttatacatggagctggtgtcgatctctccctcgatgcccgcttcatgcgcgattttcgccgtgcgctgcggcgtaaggtgttcgttgacgttcatgaacaccgtgttcaccgagttggcggtggcctggtacaggttgatgttgccccagttgatgttcagggcgttgttgacctcggcggtgatgccggagaaatgctggtgcgagttgccgttgaacatcgtatcgaagttcacgccggactgcgcggcgcccagcagcgcgaacggcttcatcgtggaacccggctcgaacatggcctgatcggcgttgttgagctgctgcgagaggtaatccgagccggcgtagaccgagaccacggcgccggtcttctgttccacggcgatgccgcccacctgaatgctctccggcatgccgtccgcgcgcgtgtctcccacggactgcatcgcatcctgcttggccttgtcaatggtggtaacgatcttatatccgccggtgtcaagatcttccttggtgaacgtcttggaagccaccagctcacgccgcaccatatccagcaggtatccgttggggccggcgtattcgttctgctgcgtcacgtcggcggtctgcgggaattcggcggccttgtgatccttggcggtgatgtagccgtcttcctgcatgatgttcagcacgcgcttgaatcgggccttggccatatcggggttgtcggccggatcccacgtggagggggaggggatgatgccggcgatcatcgcggcttcagacagcgtcagatccttggcgtccttgttgaaatacgacttggcggcggcctggatgccgtaggaattgcggcctaggtaaatcgtattcatgtagttgcacagcacttcatccttggattcggtctgcgcgattttgatggctatgatggcctcgcgggccttgcccacgtaggaggtggtttcgcccatgtagtagcgttcggcatactgctgggtgatggtcgagccaccctgacgggtgcccttggtcacgttgttgatgaacgcgcgggcgatgcccttgagatccaggcctttatccgtgtagaacgtgcggttctcggaggccacgatggcgttgcccacatagtccggcagcccctcgcaagagatgatctcgcggttctgctcggcgtatgagccaatcggcgtggtgccgtcggcgtaatagacggtggtcttctccgccaaggcgaacttctcgggctggggcacctcggtggtggcatacaggtatgcgaacacgccgataccgattgccaagccgagtccgataaggccaaagaatatgcccaatacccacttgagcacacggtggccgccattccttttatggctggatgcgcgatgggtgttggccggcttgcggctcgtgttgttcttgccgcgagggccgcgagtagagcttgttttcgtggtgcctgcagtcttgctctgcgtggcgcgaggcttacggagcgcggggccgcggtctgacgaatgtgcacgacgtttatatgaagccatgattccaccgtaactgctggccttgaacaaacgtttgacgtgaacgctctcagggcgaacaccaagcgcgattttcccggaactcttacaattgggcactattctgcgacttgcatggatattggctgaaagccgtgggcgcagcgccggccggcacgcggcaatgcctaataaaaagggcttcccgtcgctcgtccacccattttcttaagcttgacacagcctccgcgtggcggtatgtcacccaactcccccagggcaggaatgcagcaagggtaagtggcctctgccgggtacgtggaggtttttcttttgtgcggatttggccctgagcgcgcggcgatgcggcgcactgtccggggcgcggccgtacagtcgtgaatatgaatgacgcacagaatcctgtaattcgtgatccgcatgcgccggccagtatggtgggaggcgcctctgatgcgcgctccgccgccgataatgcaagtgacccgttcgccgcgttgggatcgggctccgctgcggcaagcgcgtccccaaacgtcatcgatccgctggccgggcttggctcgccggctcgcggaccgtcgcgtgggcttgatgatctcgatccgcttgattccggcgaggtcgaccgtggactggccaagctcgacccgttggctgtgcgcccgcgtatctccagtcgcgtgctgtgcgccgtgttcggcctgctgctgatcgcggcgggattcggcatctggcgggtgtgcgtgttcaccgaagacggccagtcgtatgacgaactggtctggaagaacctcgtgaccaatgtgcccgacgcggtcggcggcctgatgtcgctggtcgcccaatcatggttggtcatcgccatcagctgcctgtttgcggtgattggtgtggtttcggcgttggtgcatcgccgttggtggctcgtcgggcagatcgtcgtgttcgccgtggtgtgcctggccgtcactcgaatcaagggtgtgctgccgcgtccgttcatcatcaatactgattctcccgcagtcaattccgcgccttccgggcacacgatgctggccgccgcctgtgcggtgattctgctgctcgccgtgcctcgtgtggcgcgcgcgctggcgggcattatcggcgtgatttggtcttgggccgtcggcgtatccgtgatatacggccaatggcaccgcccctcggacgtggcgatgtcaatactgctggtggccggtctggcgctgatcgtgttggccttcacccggacgtccggcatggacgagccgggcagccgcgtctcttccgtgagcgtgcagattgttagcagcgtgctgatcaccggcggcctcctactgctggcatacagcgcatacgtgatctggcaggtggttccgggcctgaatatcagcgcgagctgggcggtgtcgggttcgatcgtcagcgccatcgtgggcgttgccggtgttgccgcgctcaccttcggcctgctgctggctttgcggcacatcactgccgcaccgctgagtcgattgggcctcatcggcgcgcctccagcgcctccacaacggtgatttatggcgcgttgtggccgtaaatttggcagttgaccatgagtcgtgagtattatgacgccagaaacaccgcgcgtttcacacaatgaataaggagtagggcatggctaccaagctcgtgattgtggagtccccgaccaaggcccacaaaatcggtgactatctgggcaagggatacaccgtcatggcatcggtcggccatattcgcgaccttgcgcaacccagccaggtgcccgcggccgataaacccaagttcggcaagttcggcgtggacgtcaacgatgggttcaagccctactacatcgtggatggcgataagaagcgcacggtaagcgagctgaaatccgccctgaagggcgccgacgagctctatctggcgactgatgaggatcgcgagggcgaggccatcgcatggcatctggtgcagacgctcaagcccaaggtgccggtcaggcgcatggtgttccacgagatcaccaaggacgccatcaacgcctcgctgagcaaaacgcgcgatgtcgacagccatatggtcgacgctcaggagacccgccgtattctcgaccgactctacggctacgagctgtccccagtgctgtggcgcaaggtggggccgggcctgtccgccggccgcgtgcagtccgtggccacccgactgattgtggagcgcgagcgcgagcgtatggcgttcaagcgtgcgccttactgggatgtcgtcgccacgctggccgcgcctgacgctttgggcgagcgcgccgagtttgcggcccgcatgatctcgttgggcggcaagcgacttgccggatccaaggacttcggctcggatggccagctgactcccgatggttttgcgggcagcgttcgccagcttgatgaggcttcagccaccaccgtggccgaggcgctgaagaatgccgacttcaccgtgatgtcgatggagaccaagccgtaccgccgccgcccgcagccgccgttcaccacctccaccctgcagcagaccgcgggaaatcgcctcgggatggggtctcgcgcagtgatgcgtgcagcacagagcttgtacgagaacggctacatcacatacatgcgaaccgattcggtgacgctttcgcaggaggccatcaccgccgcccgcaacgccgtctcctaccatttcggcgacaagttcctctccgccgagcccaagcagtacgccaccaaaaccgctggcgcgcaggaagcccacgagtgtattcgcccggcgggatcccgattccatgaccccgatgagctggcctccaagctgcccattgaccaactgcgcctgtacacgctgatctggcagcgcacgctggcatgccagatggccgacgccaccggatcgaccgccaccgtgcgcctgtctgcgccggctggtcccgccgatggtgaggctgtattccaggcatccggcacagtcatcgaatttcctggctttatgaaggccaccggcgagggccgcaagcccaaacccgccgcagccgacgcggcggccgccgataagtcgggtgccaaggcgaccaagtccgatgcctccgaatccaatgcttccctaccgccgatggaggtgggccagcgggtcgaggcttccgacatcgagccggatggccacgaaacccagcctccggctcgatacaccgaagccacgctggtcaagacgttggaagccaaggagatcggccgcccgtccacctatgccagcatcatctccacgattatggatcgcggctatgtgtatgagcgtggccgtgcgctgatccccagctggctggcattctccgtgaccaagctgctggaaacgaacttccccaagctggtcgattacacgttcaccgctgagatggaaaacggcctcgatcgcattgctcacggcgaggagactggccgggattggctgacccacttctactttggttccggcgagggcgcggcccgcaatgccgacgaagcgcatgaaggcctgcagcagcaggtggcacagcttggcgagatcgacgcccgagccatcaacaccattgacatcggcgacggcctgcatgtgcgcgttggccggtacggcccgtatctggaagatatggagcatctggatgccgaaggcaacccgaagcgtgcctccctgccggacaccatcgcgccggacgagctgaccgtcgaagtggctcatgatctgaccgacaaccattccggtggcccgcgcgagctgggcaaggacccggtttccggcggcaccgtggaagtgcgcaacggtcggttcgggccgtatgtggcgttggtgccgcctgagggtgccgccgattccgccgccactgcgccggccggcaagaagagctccaagaaggccgcggccgctgcgtcgcgtccgaggatggcctcgctgttcaagaccatgagccccgaatcgctctcgttggaagatgcgttgaagctgctgagcctgccgcgcgaggtgggtaagtacgaggaaaccaacgccgagaccggtgaggtttccgaatgcacggtggccgccaacaacggtcgctatggtccgtatctgaccaagatgagcgccgatggcaggtcggatacccgttcgttgggctccgaagatgagatcttcaccgtggacattgacaaggccaaggagctgttcgcccagcccaagtacgggcgtggtcgcggacgtggcgccgccaagccgccgctgcgtgatttgggcaacgacccgaacaccggcaagcatgtgaccatcaaggatggccgctttggcgcttacatcaccgatggcgagaccaaccgcacggtgccgcgccaatacacgccggagtcgattgcgccggaggatgcgttccgtctgcttgccgaaaagcgcgcggccgggccctccacccgtggccgccgcggccgtgagcgtgccggtgccgcgaagtcgggagccaggggagccaagaagggcgctgcttcggctgcgaccaatgccgccgaggccaagcgcgccggacgccgtgccgaggtgaagaagctggcgaacaagggctggtccaaccagcgcatcgccgaaaagctcagctccaccgccgccaccgtgaagaaggatgtcgactggctgaccgccaacgagggctacgaacgccccgccgtgatccccaagcgtggctgagtggaattattgctctacttgcgtttcaaggggctgatttctcgttttgagaatatctacttgcgtttcaaggggctggtcatctgctgaaccacgagtatgaacggctccacgccaacgtcattccgccgttttggaacgttgtctacttggacaacagccccttgaaacggaagtagacctccgggaaaggcctaatcagccccttgaaacaggaatagacgttctttaaagcaaaaatcagccactccgaacggagaagggcccgtgaatcggggcagtggccgcaactctgcgcctaacgctaaggtcgatagcatgagcggtctgtttgtttcatttgaaggcgtcgatggcgtgggcaagaccacgcaggtcgagcggctgcgtgcgtatcttgaggctcaagggcgcacggtagtcgtcacccgcgagccgggaggcactgcgttaggcaaggccgttcgccagttgctgttgcacggcgtgaacgagggggccgccgacatcgcgccacgcgccgaggcgctgctgttcgccgcagaccgcgcgcagcacgtcgccgaaaccattcgtccggcgctggaacgcggcgaagtggtcattaccgaccgctatctcgattcgtccctggcctatcaggccggtggccgcgagctcacgtcagaagagattcgatccttaagcatgtgggccaccaacaacttgctgccggaccgcacgtatctgctggacatggatccggcgctctcccacaaccgtcttgaacatgccgaagaccgtatggaatcggccggcgatgacttccagtcccgcacccgccaggcgttccttgatttggccgcggtcgaaccgaatcgtttccgcctcatcgatgccagccagtccatcgagcaggtgtgggccgccatcgaagcggatatcaaggagctggcatgagcgtatgggattcgttggtaggccagcagccggtaatcgacatgctcagccgcatcgcgcagggggacccgagccagatcgcccagtcgtggctgatttgcggtcctcccggctccgggcgttccaacatggcccgtgcgttcgcggcggcgctggaaagccccgaccatggcatgagcgatgagcccacgcgcgtcacacagcaggtactcgccggcacccacccggatgtcacagtgctggccaccaacaaagtgaccatcggcatcgaccaggtgcgtgagatcatcaccacctccgagcaaatgccagccacagcaccatggcgcatcatcgtcattgaggatgtggaccgcatgctggagcgcaccaccaacgtgttgctgaaggagatcgaagagccggccgaacactgcatctggctgctatgcgcgccgagcgcccaggacgtgctgcccaccatccgctcgcgcacgcgcattgtgaatctcgccgtgccctccgcctcggcagtggccggattcctgactgccaccacgggcgtcgagccgaaagtcgcccagcgggcggcccgtctggccgagggacacatcggcatcgccaagttgtacgccactgacgagcaggtgatgacggatcgcgacgaattggtggtgggcgtactgaacctcgctcgcgcctcggacgcggtgctgctggccggcaacctcatcgacaatgccaaggcccaggccgaggtggacgcaagccgcaccgcggccgatcaagaggcggaatttcgccgtatcaacggtcttgagccgggggagcggattccgccgaaactgcgcggcgcgttcaatcagatcgccaagaaggacgatttgaagcggctgaccacacgacgcacgcgcgatgtgctggaccgcgcgctcaactccatcgcctccatttaccgtgatgtggcggtcctgcagaacaatgcggaggattcggtcgggcttatcaacctggagaatcggtcggccatcaccgagctgtccgtgcggctgaaccgcgccggcgcggtggcccgactggacgaagtggctcacgcccgcaagcgacttgccggtaatggcaatccgctgctggtgtttgaatcgctcttttgcgcgttgattccgtgagattgcgcccttggcgctagcgcaggtgaggtgccgacgcagtatgagatggcgcttgcgatgcgccctgatgtttgtgcgcttggcggtgtaatgcagcgcagtgtggttccggcgcaatgcaaggcggccgtaatgagggccgcccaatttattcggcgtcttgcgatcccggagcgataagccgcgaaggcagattgacatgcaccggtgtattggattgatcggcgagcagccgcagtatctcgtcggcgatctgctgcagcgctggctgaatcggagcggggtcggacgtgaacgtggtgtgctgcaaccctccgatttgcacggcgggaatctcctgcgcatattgcgccagcacgtcgcccagatcaatgccaggcagtggtacgacaatcagcccatccacatggcgcgcggccatcaacacgatgcgttccttctgcacttccggcgtccgcccgacactcagcgccagctgccggccgcttctgttgaccaacggctcaagtgtgtcgataagccgtgcgctgaacggatcctgaacgctcggcacaatcaggccgatggttctcgtcacggtggaacgcagcgcgctggccgcaaaattcaccgaatagttgaggctgtgggccgcggcccgtacgcggcgggcgatgtcgtcgtccttggtgcgtttgccggaaagcacacgggataccgtggccgtggaaacattcgcgatggcggcaacattgacgattgaggcggatgatgattccgctggctcgttcgcggtcatgtgtgcctcctctcccagaaagcatgccggctcggtgaaattaccggcaatcactatagaacaaaagacggccgcccggacaggcggggcggccgtttggcaagtgagagaagtttcgcccgtttactcggcggcgagcagggtctcggtcagggagtcggcaacggtctcggcgttgtctccctcaacggtgatctgcacggtgtcaccctgctgaacgcccagtcccatgatggacagaatcgagccggcggggacggctgcgccgccttccttggcgatggtgacgttgcagccggaggccgccacggcctgagcaaactgtgctgcaggacgagcgtgaatgccgacgggatcagtgatggtgatgttgcgggtaaccataaaggacactcctttgcgtctgtctgaaatggaagtcatgcggccaattgcggcagctgcttgatatcgagtataccgagacgtagaataaaatccagaaaacgattaccgttggcgtgttgcagataataaaccaccataataagggaactaacaaagaagaacttgccggcaatggctgcggctgcatactccgaagtaggcatcgaggccactgctccaaagaactactaccctacgaacaaaggagaaccattatggaaatcaagggtgttggcattggccgcggcgtggcggtcggctcggttattcgtatggcggccccgctgccggagccttccgacgcgccccgtgccgataccgtgccggcgcagggagagatcgaccgcgtcactaagtcgctggccgtggtgaatgccgacctgagccgtcgtgccgaagaagcggctaacggcgacgaaggcgccaagaaggccgccccgattctgcaggccatctccatgttcgcgtccgacccctcgctggcggccagcatcacctcgctgatcaacggcggcaaaaccgcagagcgcgccgtgctggaaggcttcgctgcagttgaggatatgttccgcgccatcggcggataccaggccgagcgtgccgccgatctgcacgatgtgggccagcgcgtgatcgctgacctgatgggcgtgcctgctcccggcattccggaaagcgagaccccgttcgtgctggtggccgaggatctttcccccgcggacaccgccgcaatcgacctgaacaaggtgctggccatcgtcacttcgcagggtggccccacttcgcacaccgccattctggcccgcgctcgcggcatcgtggccgtggtctccgccgccgaagccgagaacctgaccaatggtgagcaggtcatcgtcaacgccgccaagggcgtggtggttgccaacccgaccgctgctgagatcgaggatgccgaggccgccaaggctcacgccgccaaggccaaggagctgcgcggcaagccgggcgccaccaaggacggccaccacattccgctgctcgccaacgtgggcaagcccgctgatgccgacccggccctggagtatggcgccgaaggcgtgggcctgttccgctccgagttcctgtttatcggcaactccgagccgccgagcgtggaagagcagaccaaggcctacgccgagctgctgagccgcttccccggcaagaaggtcgtgatccgtatgctggacgccggcgcagataaaccgctgccgttcctcactccggaagacgagccgaaccccgccctcggcctgcgtggtctgcgcacgttgaaggctcacatgaacgtgctcgaaggccagctcaaggcgctcgccgccgccgatgcccagaccgaggccgacctgtgggtcatggccccgatggtcgctgacgagcatgaggccgattacttcgtcaagctcggcaagtccttcgggctgaagaaggtcggtgtgatggccgaggtgccgtccatcgcgcttatggcagacaaggtggccgaggtggccgacttcgtttcgatcggcaccaacgatctgacccagtacacgctggccgccgaccgtacgctcggctcggtcgccaactaccagaccgcatggcacccggcggtgctgcgcgccatcaagctcatcgccgacgccggcaacgcgcacggcatgccggtgggcgtgtgcggtgaggctgccgccgatccggatttggccgtggtgcttgcaggtatcggcgtcaactcgctgtccatgaccccggtggctctggacgatgtgcgcgccgagctcgccaactggacgctggaggaagcgcaggagaaggccgccaaggccctcaacggcgacttctacactccggccgagtgaccgtggccgagcaatcggctgaataatcgggaaaatgccttgttttctatctctttgaggataggaagcaaggcattttcggtattccagggcttcccttccgtcgaggggaggccctcagtcgtgtttggctatcaccatgtattgtgatggcgttttgagttgccgcaggctgaaatctgcaacatggctcgcgatacactggtgggtatgaagatttccgccgatttcaccgtcattccggacgatttcgccaaagccgcggcccctgaatatttcaatggtggcgtgcctgtggtctccttcccgttctacatcgatgatgtgaaccccgaagcctgttacctgcactgggagttcgtggatccggattcgattccggtctgcggtttcgagtggattcactggtctgtggccaatctgcccatcgatgcgctgatgtacgacttcaacgactcgcatgcgctggccattccgccggacttctcccgtcagctgccggccatgattccggagaccgtgcaggggcgcaactcctcggcctccaagttcctgggtcgtagcactgacccgtcggtgattatgcggtacaacggaccgcagccgccggacaaggatcatgagtattatctgcaggtgtgggccaccaagaagccgcttcccggattgaatcagggattctggctcaacgaactgctgcacgcgctgcgtgccagcggcgagactcccgacaccgacggcatcttcctgaccggcaaggcgtgagccgcatgagctcccgcaggcgggggctgtcagcatagctgactgggggtggctcagcacaaaaccaccctcagtccgacttcgtcgtccagctcccgccagcgggagcgtgaccacaaacaaagaaaggacaccatcacactatggcctgcaccacgattctggtaggcaaagacgcgagctatgacggctcgaccatcatcgcccgtaatgaggattccgcaaacggcgagttcaatcccaagcgattcatcgtcgtcaaaccaagcgaacagccgcgtgaatataagtcgatgatctctcacctggccatcaccctgccggacaatccactgcaatataccgcagtgccgaatgcggacctgaaggaaggtatttggggcgaggccggcgtcaacgaggcgaacgtggcgatgagcgccaccgagaccctgaccaccaacgagcgcgtgctcggcgccgacccgttcgtggaatatgtgccggccaagggcaacgagcccgaggttcccggcggcatcggtgaagaggacttcctgaccatcgtgctgccgtacgtcaagaccgcgcgcgagggcgtggcccgcctcggctcactgctcgaggagttcggcacttacgagatgaacggcgtcgccttctccgattccaacgagatctggtggctggaaaccgtgggcggccatcattggatcgccaagcgcgtgccggacgaggcctacgtgaccatgccgaaccagctcggcattgacgaattcgatcttgaagacgccctcggcgaccaggaagagtacatgtgctccgaagacctggccgagttcatcgagaccaatcatctggatcttgcggtggagaacaccacgccgttcaacccgcgcgacgccttcggctcccattccgactccgaccatgtgtacaataccccgcgcgcctggtacatgcagcgtttcctcaacccgtatgacgaggtgtgggacggcccggacgccgaccacaagcctacgtccgacgacatcccgtgggctcgccagcctgagcgcaaggtgaccatcgaggacatcaagtacgtgctgagctcgcactatcagggcacgccgttcgacccgtacggtcagctgggcgacgagcgcacccgtcacctgtaccgcccgatcggcatcaaccgccagagccagctcgcggtgatgcagattcgcccgtaccgtccgcaggcctcccgcgccgtgcagtggatcgcttacggttccaacccgttcaatacgctggtgccgttcttcccgaacgtggatgtgacgccggcctacctcgaagacaccaccacccgcgtgacctccgagaacttctactgggtcaaccgcatcatcgccgccctgtgcgacggtgcctttcgatccacctccaacgccgtcgagcgttaccaggagaagaccggtgcgatgggtcaccgtctggtggccgccaccgatgagcagattgcgcgccttggcctgaccgcggccgaggaagccgcccagtccgccgcggaggaggagttcgaggccgacaacgtggatggtgacgtgcagccgatggagccggatgagatcatcgccgcactgcgcaaccccgaggtgcgcgagatccttgccgccgccaaccagaccatggccgaccagctcaaggaagaaaccgacaagttgcttgactccgtgctgtacactcgcagcatggagatgaagaacggcttccacatgtccgacttttagtcttgacttgcctcccgctgtgggaggctgagccgttaagaaaacagcccagtgggctgtttttaggcgaagaggcggcgacagccgccccaccacacacagaaaggttttatatgaccaccatcgaagacttcaccagccagtacggcttggtccagaaaatcgacgcattcggctacatgaagtacctggccgagaaccctgatgcgccgcgcaagcacggcaaggtgatccttgtcaccgccgatacgccgctcaaggcctcgcgcggtgagggcaagaccaccacgaccatcgccctgattgacgccctgaacaagcgcggcatcgacgcggccgccgtgctgcgccagccgagtatgggcatcaccgcagccggttccaagggcggtgcctccggtggcggcaaggcctccctgacccaccccgagctcatcgactggggtctgtgcggtgagatgggcgccatcgaggcggcccagaacctgctcgtctcctttgccgagaaggccgtggatgagggcaagctcgacacgattctcgtgccgcgcgtctccgaagtgccgagccgttccctgcgttccatcgctgtggactacggcaagggcaacgtggcggagaagacggtgctcacccccacctccgagctcatgcagattgtggtgctctcccgttccatggacgagattgctgagcgcgtgtccaagatgatcgccggcaccaaggacggccaggccgtgaccttcggcgagttcgtggacctgtggcgcatcaccggcattctggccgatgcggtcaagcccgccaagaccgagaccgtgaacggttccccggtgtacgtgcacggcggcccgtttgccaacgtgtccatcggcattccgacgttggtctccgtggagatggcttgcgccctgcatgatgtggtcgtcgttgaggccggttacggcaccgacgccggcgcccagaagtggctggatatcgcgtgccgtgaattcggtgcgcagtggccgtccgccgcgattgtggtgactcgtgcctccacctggcgcgatgatcccgagctggcttggcgctacccgttccacgtgcagcgcctggagaacctggacattccgaccttcccgctcatcaacctgtgggaaggcgaggatgatcaggttccgtccctgaaggccaccgccgacgagctgggcttccgcacgccgatcatcggcaacctgttccgcgatggcggcgaggcgctggttccgcagcttgatggttttgtcgatgcgcttgagaacggctccatgccggctgagccgcactcgcataagggcatggccctgacggagaacgccaagtgggtagccgagaacgcctatggtgttccggccgatcgcgtgatctacaagccgggcttcaccgagtccgcggccgaggccatggaactgtgccagtctgctggtatctcgctgtatgatttggccttcgtggcggtcaagtcccctgcgaccatgaccgacaacgaccgcgctccggaggccgagcgcaccgtgaccctgaagaaggtcgaagtgcacgccggcgccggtctggtccacgtcaacctgaccaccagcctcaccacccccatgcccaagatcgtgtgattgagcttgaaccgcagtaacttgctttcgaggggctgatttccggttctccggaggtctatctgcgcttcgaggggctctttgattgcgaaacctggagtatgaccgttgcaatttcaatggtcatactccaggtttcttgtattagcagccccttgaagcgctagtagagtttctgaatgttggaaatcagccccttgaaatgcagaaagcccgccagcggcgggcttttcatgtctcgaatcctcgctttgaggttgagacgttaagcaaacagcctggtggggctgtttgtagcagaaaggcaaacgacagtgagccagtaatctgcggacgagttggcagtgaagctgactggggggagtgccatggcagaccactccccccccagtctcactgtgttcgacaactccccctccgggggcaagatacaacaactagaagttgccgccgttccagccccagtcggtggtggcggtgtaacggatgtaagtgcggtcctcggggacgccaagcgtagagttcaatgcggccatgatgttttgtgtcagcttctcccaggcagagctcggcacggaacggccaaacacgttgacctccacgtaggcggccggctggtcgtcgctgccgccaaagtaaatcggcatattgtcctcaaacgggcacatcagccagccctcggacttgcccggcacagcggtgattgccctgccatatgcggccttcagtgcctcgcgctgctcaggcgtggtggatacggacacgtgagtgtgaataacaggcatggattcctccttgatttggttcgtctccagtctagctttggcgcccgtcgttatgcactgccttgatttcctccataagattgcctgcacctcgtatcggttccatgttgcttatgattgactctcctctctgagggggagcatctccaattgcggagattattggactttctggccaattcgcaccccacggtcagaccaatagtgttgaataccctctgtgagaaaactgattgaacagctgatgaagttcggcattgtaggcgttatcgcctttgtgattgactggggtatcctcaacctgctggtgggcgtattccacatgcacaacgtgttggctgccaccatctctttcatcatctccctgattttcaactatctggcgagtatgaagttcgtgttcaagcatcgtgacgatatggcgcgatggatggagatcgttatcttcgtggcgggtgccgtggtcggtctgttcatgaacgacgccatcatctggatttccacctacggtatgaaccacgacgctttcgtctcgcagcacgccgaatacctgctgcgcaccaacgtgggcaagctggtggccaccgccgtggtgatggtgtggaacttcctgattcgtaaatggctgcttgacgatacacacaccaacgcgatgaatcgtctgaagtccgccgaaaaccgtctgaccgccgaggagctggaagccaagtggcagagcagcttctctcataagcttggcgagtggtccttggagcacacccccaaaggttggccgaagtaaggcgtttttcgtctctttccgtggttcaactgctaatgggcagtgataagccacatctcagcgtcagaatttcaggaaaagaatggcttcgtcctgaaattctgacgctgagtcgttgttatcgtcggtattttaggaaatcacccttaatttcctagatttctgtcgctgagttcgggccagtgacagaaatctaggacgagtgggcaaatttcctgaatttctgacgctgctggtagttagggtgttactgggagctgatgaagctgattgggattgggattgagatgaaatcatctcaatcgtcagaggggacttggctatatgtcacacactcacttcggtgagtgttggctgttcggtggagcccttgatctgcttgaagccgatcaaggcaatcaccagcgaagccaaggccaaagtggtgaccaccatgaagccgccgtgcgaacccatgcggtcgatgaactggccggcaatggccgacccggcggaggagccgatggaattcatcgcgcccatccacgccatgccctcggtcaaacgcgagggcggcaccaagtgcagcatgagctggttgccattaatccacgttggagcctgacatacaccgatgatcaggtagatgatcatgatgacccacaaatgcttggcgaacaggaacgtgctgataccgatgttcaccacggccaggcagaagtagaaacgcttccatagggcaatcgaccagtttttcgcgccgtacaccagagcacccatcagcgagcttatggagaagcaggcgaacacaaagcccgtgtactgcttcatgttcgactcggtggcaaacgcgataatggaaatgccggtggccgactggaacgcgcccaatccaaaccatgtgacgcacacggcaatcaagcccggcccccagatggacgccttcttgccggaacgcgcatcggcgaccgcctgcgcgatctccttgtcgatcacggcttggtcggttacgccttcgcgctcaagacgacgacgggtttcttcggccgcggtctccgctttcaatgcttcggctcgagcggcctcgcgctcgcggtattccttacgggaaataccctcagcccgtgccaatgcagtctgcgacggcggctcggtggtcagctcggtgaggaacatcagcgcgcccaccaccacgcacatgccggtgaacgagaaagccagcagaccggaaatcacggccagcgtggatgccagcggattgccgatcacccacatgcactcgtccagcacaccgcacagagaaagcgctcggttggtgcgctcctgatcacccttcaagattttggtccaacgcgcgcggctcatcgcgccccacggcgggatggcagccaggaacggcgtcaggcagtacagcacccattcaggcgcccgattggtgatcgccgtggtcagcgcgatggcggccacgatccacacgatgatcgtcggaatcgaaacctgccgctggccgaacttatcggtgagcttgccgagcagtggcgtggagatggccagtgcgatcgcctggatggcggtgagcatgccggccagcgaatagttgccgtagtaatgctgtacggaaatggtgatggtcatgccgaccatcgggaacggcatgcaggcgatgaccgagccaatcgaatagcgggcggtgtggggaatgcgcagcaactccgcatatccaccaaaaactttgtggcctacttccttgatgccggccataacggtattcgtgttcgagttggacgagttattggacataacagcactacgctcctttccgctcccgattggatgtccctcgctggcgtggcgttgccagcgaagccctcatcgaatgatgtgttgtccatggtcgcgcaaagtttgcgtcgcgtgttccacgcgcatatttgcgtcacggacaatttaatcgtttgatggggtgcgacacgcggtagattggagatatcagaacaacgttttcacgcccattggggcaaggacaagaaagacggctcatgagcgcaaccaccattcatttcgtccggcacggcaaggtgtacaatcccgaccatctgctctatgagcgtctccccgatttccatctttccgatcttggccggcgcatggcccaggccactgccgcctatctggccaagaacccccaaaccaatacgattgccgccgtgtattcatcgccgctcgaccgcacacgtgagaccgccggcgcgattctcgatgccctgaacccggtgcgcgaagctcgcggcgaagctccgctcaccctcgccaccgatgaacgggtgattgaagcgggtaacgagttccgcggcaagcggatcggccatggcgagggtgccttgtggaagaacggcaactggaagctcgtcaccaacctgtacaagcccagctggggcgagtcataccagcacatcgcccagcgcatggatgacttcgcgcgcgagaaggtcgcccagcaccccggcgagcagatcgtggtggtcagccacgagtcgccgattttcagctaccgacactatctggagactggccacccggagcactggatgttcctgcgccacacggcgcttgcctccgtgacctcggtgacatacgacgacgaaaccggccgtgtgatgtcaatcacgtatgttgacccagcggccaacgtcaagtaacggcagactggtgtcatacaaccttggcttccttctctgagactgagccgtgaagcaaacagtccggtggactgtttgtaggcgagctattgaggcgcgggcggagcccgtccacaattgctgtcgagttggctcgcgaagcgagactgaggggagcctgagtcgcgcaaccgaacttctctcagacggcttcgccgccagctcccctcgaggagggagccaagtaagcgcgtacaatcgagtggtggacgcaaaggagcacggatgactatcgaactgaatcgtgaggcaatcgcgcaggtcgcagcattgccggcggtggccaaggccgctgaagtgggctcggggctgattgctttatggccgttgatcgaggctatgcagatggacaacgacgccaagtatgcggagaatctgcaggtgcgcatcacccgtgcgttcgcgcgaattctgaccggtgaagacgtcactgtgccggacgctgagttcgtctatgagggcgccgatgagattcctggccgcccgcagaatatcgtcgacgccctactcgctgccaatgacgcctacgatacgatgaccggttacgccgaatccggcgatgcagagctgattatcgatgcggccaacgccttgggtattgattgggattccgaaacggcggaatcagtgaaggaagcgattgccgctgtggaagcacaggttgaggctgacgctgaggccgatggtcgcctggccacgtccgccgagcctgctgatgtggctgttcgattcgccaccgcgctcgccgtgtgcgatgcgttgctgggtgtggtggctggggatgccgccgatacttccggttccgctgatggtgtttcggtcgatgattcagcagacgtcgcagacagtgttgccgccagtgcagccgccaaggttctgccgattctgctctacgtcaacgaactgcgcgagcagtgctcggtgccgcgcatctgcttgactgacaagcagattcttgatctgattgaagcccgtgccaatacctccggcgccgactctttggccgccaccgccgagttcatcgccccgctggctcaagccgaatgggacaagcaccgcgaagacgtgctctggaacccggacgaggccaagcgccaagccaaggaagaggatgaaaagcgcaacaaggaggccctggccgccaagttcgcacacatcaaggacgaccccaacaaggaaaccgtggagttgtaagcggtatttcccagctctttggggaaatcttcgcgttggcgatgccttagcacaacgatttctcgagatcaaggattactgcgagaaatctttgcgctggtaaccgttatgggtgaactattcgttgtcgaatcgtttcttcatgtccaatcggcgtcgcaagatgccgtgaacccttataaatcaggggggattatatggatattgtggttggtgggttcggcgagttgcgcaatgcggcatgcccgggcatcgaacaattgatattaaaagccggcggcaatgccagcaatgacagcgacgatgccgcactgcttagccgtggaaggctgcttgctgacgtgccatcgcccacatggatggagcttcataccgctgcggacggcagccaggtgctgtatgcggtgttggaagacaccaatgagatagcgtcatttcgcgtcgaaggggcgggcgactcattgcggcttgtggagctgtcccgcgtacccacgccgggtcatgccgtcactcatgtggtgtttgtgcgcgacgacgaaggtcagggtcgcctcatcaccgccgactacgccgacgggtacgtttgcgtgcatccggtaacggaatccggtgtaatcctcgaagtcgcacagatgctacgcggcgaggggcatgggccgctgccggctcaggaatgtcctcacgctcattgggtgcagccattgcctgatggccgagtgctgaccagtgatctgggcgcggatcgcatctatgtgcatcattgggagcacggcgagctgattcgtgagggcgcggtgaccctcgcgccgggcaccggtccgcgcgaccaacatctactgccggtcgattccgatgaccctgcgtacgattggcgtgtggtggtggccggtgaatggggtggcacggtaacgctgattggccctgagcccggccatgatgccaaacattccgacaatgggacaatccgtgtgctgcaaacggtcagtcttggtcctgatgcgctgccgaagccggatcaggcggcttcgctggcgtttgtgccatggaatgcactgcaggggaacgcgggtgccgcggtagccagcgagggcatagctgggttggcgtatgtggggctgcgtggttccgaacgcatcgtgacgttgttgtgggatggcaagcggcttacccggcttgacgagccggatgttcctggttggcgtggccgtggcattgattgtgccgggagccgtccgcgtcacttattggcgattggcaatctactgcttgccgccaatgaggcctcaaataatgtggccattttccgtctctccgccgatggcgaaccgaaccttgccgccacgctgccttctggagctccgaccgtgttcgtgcggttgtaaagcaatgcatacgagaaaaccgcatcctcaatcgtgatatctgttttttcagcctaacgattgggggtgcggttttttcagtgggaagaccggtttgaccgggctgccttatcgtaatgtcactgaccttgccacggcttctggccgtcgtcctcgttgtcggaagccgggatggttgaatcatccggtgcgacagccggctcggcggtaggagctggcgtggcgggctgtccgtagttagaagcgggagccgccggctgaccatagtcaggggtttgtgcggcagtgggctgcgtgtaggtggcaggtgtcgcgggctggctgtagtcgggcgcagtgggagccggctgaccgtaagcggtaggtgcggccggtgcagtcgactgcgcgtacgggtcgtggcccggtacaggccgagcagtctgctgggcatacggattataagccggtgcggtcggtgcggcctgcccgtaaggcgcggcattcgggtcgccatagcccggcgcggcctgagcgtagccgttcggagcgccagcgggaggaaccggagcgccataagggacggctgcgacgaaatcgtcgtcaaaacgcgcgccttccggcttgctgggtagcgtcatgaacacaatgtagacaatgcccgctgcggccgcgattatcgcgccgatgaacaggatgccaaggctacccgctgcggctgtggcatagtagccgctgtcagaggggcttccccagactctgaggacgccgaagagtgcagcgccgccgccaacaatcatgaggattgcgccagcaaacacggctccatagaagatggcaagccaccagccggacttgttgatgtcgtggagacggcgaacggatagtgcgatgctcgggacgagtatggccaggctccacagcgaagagaggaatgacaggtggtcattggagacatccacgagggttgacagcacgacttgaatggcaaagctggccagcatccaccaccagaattcgctgcgggatgcgcggcccctgaacaccacgtacttcttccaaaaacgcaggaatgcctcctggaaggagcatccgtagtagggcttgttcagcggaaccgcgttggtgtctgtggcggctgcggacgcggggtaagcgttgtaggtgggcggcacttggccgtatgcgccatcgggctgaccgtagggattgccattgggctggccatacgcaggtcggccgtaggcgggagccgattgcgcgccggctggttggccgtgaggctggctgtatgccgggttgggttgcgtcggctgctcctgtccatacgcgggctgtccgtaagggttgccggagagctgtccatatgcgggtgcgggagctccgtactgcggcgccgcggtattcggctcggctggattattggcgtcaggcgtgccgttggacgcaggatactgcggcgcgggcgcaccattgttgggatcggtcattgatacccctttcacaagatgagactcatcgtctctcatttttccagttttttatgaaaaacccaacagaaacaatgaatgttgtctgaatgtggacagtcttggcgatatagcgtgatttgttatcaaattgatgtcgaatgatgatgaccgtttctgtttggtcgtgttactttaagacaagatttgcgtacggttgcagggacggagctggcgggcaagcgaagttctcggcgcaatgaataccaacaataagacgtaaggaacaccaatgaaccgcgattacgctgacactgacgtcaacgccgaccttcacgaatcccgtgagagcgagtcccaagactgggatctgctcttcgtgagtctgtcctgctgattccaagggtggcgcgtccggcgcgcgcggcacaataggggattatgactgatgctgaaaacaccaaacccgaactccccgagaacgttcgcgtccgcttctgcccgtctccgactggcaccccgcacgtcggcatgattcgcaccgccctgttcaactgggcggaggctcgcgccaccggcggcaagctggtcttccgtatcgaagacaccgacgccgtgcgcgacagcgaggaaagctataaccagattctcgaatccctgcgttggctgggcatcgactgggacgagggcatcgacgtgggtggccctcatggcccgtaccgccagtccgaacgcaccgacatctacaaggatgttgccgccaagctgctcgaagccggctacgcctacgagtccttctccacccccgaggagatcaaggaacgcaatctcgccgcgggccgtcccgccgagttcggctacgacggctacgaccgtacgttgaccgacgagcagaaggaggctttccgtgcggaaggccgcaagcctgcactgcgtttgcgcatgcccgatgaagacatcgccttcgacgatctgattcgtggcaccatcgagttcaaggccggctccgtgccggactacgtgatcgtgcgcccgaacggcgaccccctgtacacgctgaccaacccggtcgacgacgcgatgatggaaatcaacgtcgtgctgcgtggagaggacctcctgagctccaccccgcgccagatcgtgctgtaccgttacctgatggaacttggcatcgccaaagaaatgccgctgttcggccacatgccgtacgtgatgggccagggcaacaagaagctctccaagcgcgatccggaatccaacctgttcaaccaccgcgacaacggcttcatccgcgagggcctgctcaactacttggccctgctcggctggtcgattgcgccggatcgcgacgtgttctccatggatgagatgatcgccaagttcgacgtgcgcgacgtgaaggccaacccggctcgcttcgacatcgacaaggccatctccatcaacgctgagcacatccgcatgcttgagcccgaggacttcctgcgccgctctgtgccgtacctgcaccgtgatggtgtggtttccgcggataactgggacgcgctgactgcccgcgagcaagagattctgaccgccgctgctccgctggttcagccgcgcgtgcgtctgctgggcgaggtcgctggtatggtcggctccctgctgtccaccgaggaatatctggagcctgcggatgacgccaagaagcagctcaaggattccgccggagaagtgctggacgccgccatcgccgcgctggaaggtgtggatgaggccgattggaagaccgattccctgcacgagctgctcaacaagacgctggttgaggacggcggatacaagccgcgcctggccttcggcccggtccgtgtggccatgtccggccgccgagtctccccgccgcttttcgagtccatggagatcgtcggcaagccgctgaccatcgcccgcctgaagggcctgcgcgcgcatctgtgatttctcttcccgaggggaagctaaaggcgggcatctgttcacgcagatgcccgccttcgcatactccaagcaatgcctgtgctgccgttgtgactcgaaatgccgagcgcatgcattcattaggtagattggccattcatttggtaggtactccgtcacgccggtcattggaatggcgggtttctgtggatgcggcttgagcgccacctaccaaatgaatggccaatctacctaagaatgagctgagagacctctgctgtgcattttggccgatgatgatgtaactagatgcgggtgggttcggctaatgcatagtgcgacacgccgggagttgcggtgatctgtatcctcgcgtacagtattcatctgttgcgcggttcgcttcgcaaccagtgaaaactgaatatgcccccatcgtctagcggtctaggactacgccctctcacggcgccaacaccggttcaaatccggttgggggtacgacgaacaactcttcggagttgctacgccaagccaaattggggtgtggtgtaattggcaacacagctgattctggttcagccattcttggttcgagtccaggcaccccagccaatgaccctcgcggattcgcgagggttttttgttttccccggtcgaatctcggcggtgcgaattatgccgacgtgcggagtgccagtcggagacgggcagaagcggacgcgaacgttctcggggagttcgggtttggtgttttcagcatcagtcataatcccctattgtgccgcgagtgcggacgccggtgaacagcagtgcggtcggtttcttgtccacataggtggcgagatgttctcgaatcttgccggccaagggcgcgggcacttcgatatcgcgcttgctactgggcgttttcgtctccccgaggattgacaccttgtgcccgttctcgctgacttccttggcgctacggcgcacatgcaacagcgcagggcttgcatccagctctatatcacgatgttgtaagccaagcgcctcgccttgacgcaagcccagcgtgccggccagcaggacgccaagggcgagattgggcggcatggcgtcggcgagcgcctgaacctgctcgcgggtggctatcacatacacatgcttcgtcgccgggcgcggcaccttgaactgcgccgggttcaccttgatgagcgtcgagccctgatcgtccagcggctttgtggcggcggttctttgtcggcttcgccatgacacgcctccctgatcgtcggcaagcactaagagcggttaggcggtaagccctaaagcggtaccgctcaatttaccgacttttctaccccagaaaacggttcaaaacgtgccggaacggaaagcggccagaatgccgtaatgcctcaaaaagcccggaatgccgccgttttggcaatgaaaaagcccttttcctatgggtgggaaaagggcatgagcggaggatacgagattcgaactcgtgaggctgttacaccaacacgctttccaagcgtgcgccatagaccactaggcgaatcctccatgccgtactatgcttggtgaaaccgtgctcagtaggcaactcgaataaactaccacaggtctcggataagtgcatactcggcgtggcgtgagttcgaatctcgtatcctccgcctccgatttttggtgcgcgggcagctttgtcgctcgcgtctctcgtcttttggctgtgcaaatgcatcgtggatgagaagtctgcctcatgctgagctgcgcagtcgcacaacagtacaaccgtgcagtcaaaaacacacaaccgcatagccgcacaatatgaggggatgttaccgctcacatgctggaatcgcagtcagcattgagcgccaatctttcaaatagtgagacattttaatggctcttgaatgacgaaaccagctctcaataccgcacatctactagaaaatcaagactgttgttgaagaatttttttctatagagttcatagttggtcttgagctattgagctaatgaggtatttgcagtgagagagggtttagcatggttcgtcgcgcctgtgcgcagtccgctgaactgaacacaattcgagaacacgatacgcacgttgccgattccttcgcgcgcgcgatgcaggtggacgctgcccatcagcagtcgtccccgatttcggcgcgtgcaatggctgccgtcgtgttcctgttcgcattgattgccgcgaccttccttcccgccgcagtcatcccacagtctgccttcgcggatacgccaacggccacggtggttaccgcagccgataagacggacaccagcggcgttgagtacacgacctgggccgacgtgtccaaggccatcgaggcgcagctgcaagcaggcgccaaagaatataagtccggcaacactgccggctccacgtccgcgtttatgtccgcgtacaacactatctacatcgcctccaacttcaccgccgtggtgcgtgacaccattagctcggataagcagaccgcccagcagcaggctttccaagacatacagaacctctcttacacggccggcaacgatgatcagctcacccaaaaaatcgacgccctgagcgccgacctcgacgccactgcccagcagctcgacgccaatacccagctcgccaagccgaagcagtacaacgagaatctccagaagcagatcgccaaggagcgcaaggaactcgacgccaagaagaagcgcaccaagaacacggccaagacttggaaagacgtcgcagacgcgatgcttccgattctggataacgcctacaaggcctatgaaggcggcgacgctgccaagggcgccacgcttgtgaatgacgcctactaccagcactacgaaaagctcggtttcgagaagaccgtgctgagcgccatcagtggcaaccgcgtctcccaggtggaataccagttcaagctgtgccgctcctcgatgaacaccggcaagtcgacctctgaagtcaagaagtacgtcgaagacctgaagaacatgctgaccaccgatgccgccaagctcgacggtggcgctgccgatcaggagggcggattcctcaagttcatcaccagctcggtcggccaagcattcctgattcttatccgtgagggtctcgaagccctgctcgtggtcgccgccgtggtggcctacctcgtcaagtccggcaacaagcgcttcaccaagtggatctacgtgggcgtgctcgccggtctggccggcgcaggcgtggtggcaatcatcttcatggtcgcgttcggtggctccggcccgctgcaggagatcatggagggcgtgtgcgcgctcatcgccatgtgcatgctgctgtggaccagcaactggatgctcaacaagtcctcggtcgaggcctggaaccgctacatcaaggaaaagaccgaagccgcagtggcgtccgtctcctcgcaggtcgaggccggcgagaaggtggcttcccgtacggtggtctcgctcgccatgttgagcttcctcgccgtgttccgcgagggcgccgaaaccgtgatcttctaccagtccatctacacgatgagccaggatacgcacggcatggtggtcggtgcactcgccgccgccgtggttctcgtgattatcttcctggtgattcgcttcacctccgtgaagattccgattggcccgttcttcttggtcacttcgatcttgatgtccgtgctggtggtcgtcttcgccggcggcggtgtgcatgcgctgatcgagggcgacctgctgcccgccaactacttgccgggcatgcccaccaacgattggcttggcttctacccgtacgttgaatgcatcatcgcgcaggtgctggcggccatcgccgtcatcgcgctgttcgcggtcggattcatcaaacagcgcaaagccaaggcccagctcgccgccgccccggatgcgaaggctagcgaggctgccgcccaggcgtaacgcaacacaaacttgcggcatggagacggaagcgattccgccccgcgccgtcacaactaaaaacaaaaaaagaagtcgtgaataatccattcaccacaacaaaaggaatatagagaaatgatgaagaacaagaagcttgccgctctgctcggcgtgctgctcgccggctccatggctgtttcgatggctgcttgcggttcgtccaacaacgcctccgacaccaaggcgtctaccagctcctccgacaccgccaagaaggacgattcagccaaggctgatgccccgagcgataccgctggctttgaagaggtcccggttggtccttccggcaccgctgaggagcaggataagcctgccggcccgctgaccgtgggcgctgtctacttccagccgatcgacatggagcccgcctcctccggtctgaaggccgccgatgcgagcttccacctggaagccgacatccacgcctcccaggaaggcaccgactacggctacggcaagggagacttcgttcctgacctgaccgtgaactacaccatcatcgacaagtccaccggcaaggaggtcgagggcggcaaggccacctccggtaccttcatgcagatgaacgcctccgatggcccgcactacggtgccaacgtcaagctcgacaaggctggcacctaccagctcaagctctccatcgagtccccggcctccaagggctggatgctgcacgtcgacccggagaccggtgtgaagaaccaccagttctggaccgagccgatcgaggtcaccttcgacaactgggactacaccccgcgtcagtggtgacggcgtaagcccggtgggctgtttgtaaccgtcacgagcgatgcgacagcatcgcgagcagcattgagccggccgcaggccgtccataattgctggtgatttattaagctccctctgatgagggagctggacgccgaaggcggactgagggagagaagaacagtaaaacaatacgtggagtctctcccccagtctgctacgcagacagccccctcgtcagagggggcttatattacttttagcgccaatgcaaagaaaggacgcgaatgcttgaacaattcgtggcagtgatgccgggaacattggcccccgcattactggtgatgtgcctgagcgtgatgctcgcggtcggcgaagggcgagacaagcccgccagcgcgcattggcgtctcatcggcctgatcgttggcctgatcgccgccatcgtgttcgcgagcctgcgcgcctcggccgtgatcaaccagcgcacattcgtcaactatccggtgctgtggtgcgcgatcattgccgacatcctcgccatcatcgtcgtagtgttcgcacgtcgcatcaccaccaattggcagcggcacaaggccatcatgcacatcgcgaacgccatcgccgccatcgacatcgcgctcaccctgttctacgcactgccggacgttattctgcagctgaccatctgggtggagcccggcgatccgatcttcacctccgacatgctgttgcgcgcgctcggcttcgcgctgggcctggccatgtcgattatcgtggccgccatcttccgcacgctgcgctccaccgcagtgcgcgcctcgttcaccgccgcggtcctcgcggtgatggtgattctcttcatccagcacctgaccggtgtcatgcagattctgcaggcgcacggcttcccgatgggccacacggccttcgtggccctcgcatggtcgatcaaccacaacagctggatgatcatggcgcaggcattcgtgttcctgattccggccgtcgcctccgtggtggccggcttccgcatgccgctgaccggtgcgaacgaagccatcggacgcaaacacaaggcattccgccgccgtgccgtggcctccgccgtatggagcctcgtggcgatgattggtgtcacgctgaccctcaccgtcggcgtcgccgcaacccagcagaccatcaccctttcgccaccggaggcctactcactcaaggacggcgtggccaccatcccattcagccaagttgaggacggccatctgcaccgctttgaatacaaggccaaggacggcaccgtcatgcgcttcatcatcatcaagaagaacggtggtgcgtatggcatcggtctggacgcctgcgagaactgtggcgacgccggctattacgaaaaggatggcaagatcatctgcaagaagtgcgaggtggccatcaacctggcgaccatcggcttcaagggtggctgcaacccgattccgttcccgtacaagaccggcaacggcaagatcaccattcaaaccaccgatctggacgcgctgagcgcccacttccagtgagtgaaggcaggaggcaaaaaccatgttctttctgcgtatgatcgctcgatcgttcacccgccagctgcgccggcgcctgctcatcgcgcttaccgtatgtctttcggcgacggtgtctgtgtcgatgctgggcgtcgtgttcgacgtgggcgacaagctcaacgccgagctgtccacctacggttcgaacatcaccgtacagcccaaggcggatgcggtcgtctccgacctgtacaacaccgaggcaggcggcgtggcgtccaccagcgatccgaccgcctttctgaaggaatcggacgcggccaagatcaaaacaattttctgggcgttcaacatcaccaacttcgcgccgcagctcaacattcacgccaccgtaaacggcaccaatgcgtcgatcgtcggcacctggttcaacaagaacctgaagctctccaccggcgagaccaccgtggtgggcgtcgagggcatgcgttcgtggtggcagcttgacggcaagtggcccaaggacgattccgaccagggcattatcggcaagacgctggccaccgaactcggcgtaacaaccggcgacaccgtgaccctcaacaaaaccaccgcctcgggcaagaagaacgagcagaaaatcacgctcaccggcgtctacgattccggtgacgaggataacggctcgctatacatcgcatcctccatcgctcaggtgctggccgatttgcccgattcggtggacaagatcgaggtcaaggccctgaccacgccggagaacgacctggcccgtaaagccgcgcagaacccgtccgtgctgagccaggacgagtgggagacctggtactgcaccgcctacccaagctcaatcgcctaccaaattgaagaggtgattccgggcgctgtggccaagcaggtgcgtcaggtggccgctttgcagggcaatgtgctgcaaaagacgcaggccgtgatgattttgatgaccgtgctgagtctgattgccgccaccgtggccgtggccaacctgatggtcgcctcgatcggcgaacggtccggtgagctggcgttgctcaaggcgctcggtgccaccgatgccgcagtgtcccgcctgatgatggctgaaacggcgacgatttcgttgctgggcgcgattgtgggtgcgctgcttggttcgggtgtggcgcagctgattgggcaggtggtgttcagctccggcatcaccatgcggcccatggtgttcgtgctggtgttcgtgctgctggccgtcaccgtgctgttggcatccgcctcttcgattcgttcgattctgaacctcaagcccgcggaggtgctccatggccgctgagtttgcccacataactgggaaggaggaaaccgatgactaacaccggcatgttcttcaggatgctgttcagcgccgtgttccgccgtcgttcgcgcgcgatgatggcggtagtggcgtctctggtcggcgcggccacactgttctgcttggcgatgatttgcatcgccgtgccgcagcagatgaatgaggagatgcgtgcgtatggcgcaaatctgattgtcacgcctaccgaatccactggggataaggccggcatagatgagtcgatggtccagcacaccactgaaatggtcaaagccaagggttctgcgaaatacgccacctatcgctacgaaaacgtgcgtgtgaacgcgtctccgtatgtgatggccggtgtcgatgcggcgcaggtaaagaacctcaatcatcactgggtggtcgacggtaagtggccgtcctccggcaaggtgctggtcggccgtgacatcgccgatgctatcggtctcaaggtgggctccgccatcactatcggttaccgtgcgtccgataatgccagctctactggtacttcggcctcctctaacgaggggaccggctcggcgaatgacgagacctcctcaagcagctcccaaaactcgtccaacgacatgcaaggcatggatatgtctggcgacatggctggtatggatatgtcaggctcgtcatcctcggaccagtcgtcctcaagcccaacctctaatggccaatcaggccaatccccatccgatcagccaactcaagacggccgcgtctccagcgacatcatggatacctccggcaccgaattccgtgtggccggcatcgtggacaccggcggcagcgaggattcgatcatctacgccaccaacgccgacgtcaacaagctcaccggcgtgacgcgcggcgtggacgttattgaatattcggccggaaccagcgacctcgcagggctggtttccagtatcaatgagatgacttccatgcacgtcaaggcgcagcaggtcactaagatcaccgcctctgacacccgcatcatcaccatgttgcagacgctgttctgggtcgtctcgctcgtggtgctggtgcttacgctcgtcggcgttggcaccacaatcagctcgatcgtctcgcagcgacgcaacgaaatcggcctgcgtaaggccctcggtgccagctcacgcgcaatcggcattgagttttatgtcgaatcggcgttttacggcctcatcggtggtctgattggcactgcaatcggctacggcctcgccagctggctgtgcgtggcggtgttcgagcgctccatcggattcaactggtggctggcgctgatttccgtggtgttcagcgcgttggtcgccgtagtcgcctccatcccgcccgtccaccgcgccacccgtattgaccctgccgttgtgcttcgcgaagaataaagaaagagaatcgtcatgctacttgaactcgaccacatctcgaagatctacggcgacctgcacgccgtagacgacctcaatctgaccgtgccggaaggcgaatggctggccatcgtcggttcctccggttcgggcaagaccacgctgatgaacatgattggctgcatggacacgccctccaagggttccgtgaagctcgagggccgcaagctggaggatctgaacgccacgcagctggccgacgtgcgtaagaacctcatcggcctggtattccagaagttttatctggtgccgcacctgaccgctgtggaaaacgtgatggtggcgcagtactaccattcggtggtcgatgagaagcaggccatggaagcgctggagaaagttggtctgaaggatcgcgcctaccacctgcccggccagctctccggcggcgagcagcagcgcgtgtgcgtggctcgtgcgctaatcaacgatccgaagctaattctggccgacgagcccaccggtaaccttgacgagaagaacgagaagatcgtgctcgacctgttccgcaagctgcatgaacagggcaccacaatcattgtggttacgcacgatgcgctggtcgccagctgcgcgcagcgcgagatcatgctcaaccacggcgtgctcgtcggcgagaagtggaatgacgaggatgcgcgcaaggtgtatgaggcggtcggtggaaagcccgcttccacgggtgcgcaggtggaaggcgcacaaaacggcgaaaccgccatcggattcgccgaccccaccaaggccgcaaaaaccggcggcgaagagtagggccgtatattggcttcccccgggcacgaggggagccagtgtgaggtgcgaataggatattggatatgactgaaaagaacacgttgaagaagtccgcgacgctggcggcggctggactggtcgtggccggtgcgctgctggccgggtgtggcgaatccaaggccacgccgatggatgacgcgtatgccggtaattcgggcgagacccagaaatcgcaggaagagcagtcgcaatcccagtcggatagctcgaatggttccgattccagctcgtctcagaacgacccgtccaccaccacatccgacaaaaaggacaccggcaactacaaggacggcgactactccatcaacggtcagtatggcccggtcggcgaggattccatcgatgttcatctgaccatcaaggacggcaacgttgagaacgtggaaatcgtgggtcacccgttcaccaagatttccaagggccaccaagatgacttcgccaaagccatcaacggcgtggtggacggcaagcccctgaagggcctcaaggtggataaggtcgccggcgccagctggacttccgacgcctttaacaaagccctcgaagtcgcccgccaagaggcgtccattcagtagtaggtagacatctgcagatttttcaaccgcgggaatgggcattctccgcttcaaggggctgatttggcctttccggaacctctacttgcgcttcgaggggctgcttgagggcgagatctcaactatcagacgcatattggttacgttattctgccgtttttagtgcctgtctactttgccatcagccccttgaagcggagatagatgttctgaaaagaccaaatcagcccctcgaaggtgaagtgcacgtgtagtccgttacttcagtaacgccggccagagtagatcagacatacgggcggcccaggcggtgtcgtcatccatcgctttgccttcgatggcctcatacgccaccaaagacccgatgatggtggataacagcagtttctcgtcaacactttcgcggaatacaccttgcgtcacgccctgcttcaagaatgcggcaactcgactcagccacggcgtaatcacctgattgacaatgtgctggaaaaattcggcctcgctggatagcacaatgcctacgcgcttgacatcgatgttgttattgcgcacccagtccaccagtcgttgcaacaactgagtgaaatgctcccgcgtggggctgggtactgggccggcgtccgggttgaccagatacatggcactgatctcgcgcagcagctcgtcagcattatggtaacggcggtaaatcgtggttttggccacgccggaacgacgagccacctcttcgatggtcacgccgctgatgccgcgatccacggcgatctgcagcgtggcctgcatcagcttgcgatccgtcgcctcgcgggtgcgctcgcctcggagcatcgtgtccgttgtcctctccatcatctcttctcttcaacatgtgctcccgctggcgggagctggccggcggagccggactgagggtggttcatgtcgtcggctcgggccatattccctagctcagtaccttagtgctctcgacctgcgccacataccactggttgaacttcaccagtggcttgcgcagcagcagtcccaacagcaacagcggcggtatgaacgccagcagcagtccggcagccctccaatagtccatgtcgtagatgccggcaatagccgcgcgcatcatcgtcactgcgtgggtgagtggcaggaacgggctgactttcgcgatgaaatcaggcagcatttgcatcgggtaggcggcgtttgcgcccgatatctgcacgatgagcatcagcacgccgattgccttgcccacattgccgaagctcgccaccatggtgtaggcgaagaacgagaacaccagcgaagccagccatcctgtcagcatgaacagcagcggatgcacggcctgcacgtgcaggaacagcaaatcgccgcccaaggacacagtggactgcagcaacgcaatcagcgcgaacaccccgtaatggcctaggaatagctgatgtgggcgcgggttgcccagtgattcgcgggtgcgccgcgacacggaggttttgagcgtgaccgccatcagtagcgatccgacccacagcggaatcagcgtatagaacggggccattgaggagccgaaattcgccacagggaacacggccttgcgtttgagctgcactggagcggccaaggtgctggccaacgtttcggggtcgttgcccaacacctccttgaccatgctcatgtcgccgctgttcagtgcctcgctcagcttgccgttgaacgacatcagttcggagcttgcggagcgtagtttgttggccactttgtccaatgtggcgtgggcatcggcaagcatgctgtcggcatcgcttgatgtgcttcgcagatcgccgagtgtggtgttcaacttggccgcgctggtgtccagaacactggaagcatcggcaaccgtggccgacaaggactcgatttgtggctgcacgttactggcgtaatccgcggtgatgctggcaatgctgttttgcgcctgcttggccaggtccttgacctgcgcccgctggttctgcgcgtcttggttgccctggcggatatcgctggctgtcgtgttcagcgcctgctgcaacctggtctgccgtgtgattgagcggtccaatgccttaacgatggacgaatcgtcgcccagtagtccggccagcgtattgcggatttcggtatattgcgcggtctgcttgcccacggctgtggcctggtgttccagctcgtcggcggtcgtggtggctccgctgttcgcgtcggcatagagcttatcgatggaatcggacaccgcgccgaagctggaggcgctcgtgtccagcgcgttgctcattgcctcggtggtggtgctgagtgcgccggccacatcgctgacgccttgtttggcgcctttgagatctgtgctgccttgttgcgcggcgctggaagcctgcgtgatgagcgcgttcgcggtgtccagcagagcgccggcggaatcggtgagtgagccataggtgccgaggagatcggcggtgctctcgagctgggtggcgaatccggcgatattcgtattgaaggtgttcagttgctctttcgctgcgggcgtggagagttggtcagccagcgatgacgcaatctccagcccggccgaggtgatggttttggcaaagacggtgttgatttccgccgccacctcgtcggtgccctcgttgagtaggttcggagccagcgcgttcttcttctcgttgcggtagtaggtcagctcggcgtgctgcacatcgtcggagaagaaggtcatcatgtctttgctgaactgcttcggaatcacgatggccgcatagtatttaccggatttcgcgccttcgatggcgtcggacttggaggtgatggtccagtcgagttcgctgttggcgcgcagggcgttgaccacttggtcgcctacggtgactttaaccggaatcagatcggatcgatagccctcatccacattggctacggcgaacttcaggttcttcatgttagagaacggatcccagcaagcggccacattgaaccaggtgaacaggccgggaatcatgaccaagccaatcacgatgatgatggacaccacattgctggtcaagcgcttgatgtcgccggtaaagagcttccagattgtgctcatcgtgcgtgcttgccttccttggtcggcggtgttgcgggaatggtaagggtgtctgcgctgtggtcgggccgtgcctcgacgttggccggcggccggtgaccggttttatgcctgtacagcatggtgcgaatcgattcgtcggagaggttgccgagttcggtttggcggcggatggaatcgcgcatatattccacgaccatcaggaagccgacgatgatgagcacccatgccagccacgtgcccatcaccacgatcttctcgctggtggtcagcgagaagacgatgatgagcgctgccggcaccacgaatccggcaatcaacgcgcccagcaagaggcgtgggtagtggtaggcgaatttggcggcgcggcgctcgatggcgtggcggtattcctcgcggtcggccagtgcggcgatagcctgggtgacgcggtattcgttgctggtgatgtgcaccggctcgccgataatcatgtcgctttccttgatttcgcgggcgaacagacggttgagattcgccagcttggggcgggcgccgaggccgagcaggaaggcgagcgtggcgaaaattagcattttgccgatgtagtcaaaccagtgaccgtcatagaaaccgccgatggtctcgcgcaaggcatcgatggaataggtgaacggcagcaacgggtaaagcgtgcggaagaatcccggcatcatttcgatcgggtacaggccggaggcgccgggcacctgcaggatgaccagcgccacgcacacgcctttgcctacgtgcatgaaggtggtggagagggcgaaaatcactgacatgtacaccagtgaagtgatgacgcaggtgagcaggaacacgggcgcgctcgcgcattgaatgccgatgatgaggtcgccgatgccagtgacaaggccctgggttgcggccagcgtggccagcagcaggaaacggccaagatagccctgggagggggtgaggttatcgatgtcttcatcgtcggtctcgagcttgggaatcactacaagcacgaatgcgcccacccacagagacagggtggtgaacagcggtgccatgccggaaccataagcggcgaccggatagatggccttctcgctaatgacggtgggagagagcatgaagtcggatattgtgctggcgtcgagtttgccgtcggtgccgataagcgcgtttagcgaactggagatgctcagggccttgatatccgtggcgagtgtgctgagtttggcctgcacgccggccagagcctggtcggtgctgttcaacgcggttgtggtggaggagaccgctttgtcgagctggtcgagggtctgctccgattgatcgatgagcgagctttgcgaggtgatgccgttggacagcgtactggctgtggaactcaacgtgttcaggccggtgttgagttggggaagcgcgccggaaaccagtgtactgcgtgcggtgttggtggcatccagtgtggtctgggtagcggtgttgaggctgctggccaggcctgcggtatcggtgtaggcgttaccgatggtggtgttgagactgctgagattattcagggtttcggcgaggttgctattgcggttgtccagcttgctgatggcggatttgagcggttcctgattggcgttcggcagttccttgagctgggcgatgacatcggcgttggcctgattgatgtctgcggcggtattgatcatgccgcctacctgctggttggcggagttcagcatgccggttactgtgccgatgctctgattggctcgagaggaagcctggctcagcaggcttgacccttggtcgagggagccggatgtggcggtgacgaaagtattcagactggtctgtgtggtgccgatgagtttggacgcgccggccagtccctgtgcggtgtcgatgccgagttctcgtgcgtcttccagcgcttggcgggccgtccgtgtttgttcaggcgtgccggcgagcttggtgttgagtttggcgatggtgtctcgcgtgtgctgcacgtcactggaggcttcattgagtgcagtgatcgttttggctttggtctggtcttcggcagcgatggttctgtctccgaccgtgttgatgacttcggtaagcacctcggacacggtggacacaaaagtggagttgaccgtgcggtccacggtggatgcgccgacgtcggtgactttgggcgcgatggcgctggctttctcgttgacgtagtactggagggtgggtttgtctttgccgccggtcaccacaccggcaaggtcattggagaaatccttgggaatcacgatggcggcataggctttgccggattcgacctggctcattgcttcggcctcggtaacgaaggtccagccgagctggtcgttgtctttaagctggttgacgatttggccgccaagattttgtttgccgatcagggcgttgtcgatgccggtgtcgttgttggccacggcgacggtgatgccgttggtgttgccgtatggatcccagaagccgacgatattgtaccaggaatacagcggcggaatgaacaccatgccgaacatgatcacccaagctgccggcactgtgaacaggcgcgcgaagtcgcgcttgagaactttcaggatgttgcccactgatacccccggagcctgctgctggattactgcgtttctcgtagcgatacggtaagcgtagcgctacggtttaagtagcgtaataccgccgggggagattgatgggtgatttcgtccgaatatgcgactgcccggcggcttatcgtgcgccgttgggcagtgtgtctggttttggtgtttgtggggcgttgaaaagagtcgttttgggcggtatcctctccctgccgggaaagcccaccgcgtggttaacttttcaccgcgatgtgttcgtcccaccacgtagtgactgttccacggcgaggtgtcgcaaaatggctttattcagccaaaaccaaaatcctgctgacaacgtggtggggtgttcgccgcgtggtggaggtggctgtaagggtgtcaaactgttttgatgctcctaagtttggcaaacccccgattggggtgatagcgtgaaatgacgctacgcggagggaaatcatgctcagaaacgacgatgcggccgcaagccccgggaatgcgcgggagcgccgcagcggcatggatatgccgggcacacatgcggattccgaggataggactgccgcggacaacattatccacgttgccgatggtgccaagtccgccgtcgtggctgatttggtggccgacgagttggacgttgtcagtctgaatcccgatgccaggcgtctgccgattctggcgcgtatctatggtgtgctggtgctgctcgacggtctggccgtgctgccgttggtggtgctgacctgcatctactccgtgcgtgagattctgaatggccgtgtgcacgtcgatgcgatgagtctgaccttcattctttccgtggtctacgcgttggtactgatcgtcagtgccgtatgcctcatcgtgttcggtgttctgctattgcgtaatcaccgccgttatgccgcgcgatggacgtatgtgctgatgcctctcaccttggccgacggcatgctgtctctggcgctgaccggcctcgggttcaacctgttgctgccgattatccagatgatcatcctcatcgtgatttcggtgactgccgatccctccctgatagaggagagacgcttgcaacgcgcgctcaagcgtatggatgagcgcgatgagtacgagtccgccgttgctgtcggcatgctcgggcgtgaccagtccggcaaaggctatatcgcactggacttcttcaatatcttctggctgttcaccatcgcttcagtgggcggcttgattgtggagacgatatatcattttgcgctctataacggtgagctgcaggaccgcgcgggtctgctgtgggggccgttctcgccgatttacggctgcggtgcggttttggtcaccgtgtgtttgaaccgcctgtggaaggcgaatccgtttctgattttctgcgcgtcggcggtgattggcggtgcgttcgaatactgcacgagttggttcatggaagtggcattcggcatcaccgcatgggactacaccggtcgctggctgtccattgacgggcgtacgtcgggccagttcatgttcttctggggtctgattggcgtggtgtgggtccgctggctgttgcctcgcctgctcgcgctcatcaatcggatcccttggaaagtgcggtattcgttgactgcggtgtgtgcggtgctgatggtgatcgacatcgccttcaccctgatggccctagattgctggtatgggcgcatggccggtcagccgcagacttcgccggttgcgatgtggttcagcgagcgttatagcgatgcctatatggccaatcgtttccagaccatgcacctcgatccctccaaggccgggcgaatgtgacgaatctcttatgcgagaggcgtaagacagctcgtgcgtggtgaccggccgggcgatagactggagcatgttgtgataatttggggtctctgacagggaggccgccggtcgcgccactgccggggtcttggtctcggttgccgacgaaccggttgagcgggcaatcacatattgcccacctgtaaggaaaggcaaggcacatggccgaagctacggcaaacatcggtgtgatcggactggctgcgatgggttccaacctggcgcgcaacctggcacaccacggcaacacggtggcattgttcaaccgccactactcccgcaccgaaaagctgatgaatgagcatggcaccgaaggcaacttcgtgccggccgaaacactcaaggagttcgccgcatccctgaagcgcccgcgtaccgcgattatcatggtcaaggccggtgcaccgaccgacgcgactatcgagcagctggaaaaggtgttcgagccgggcgacatcatcgtcgacggcggcaactccttcttcaaggacaccatcaagcgtgagaaggaagtgcgcgccaagggcttccacttcgtgggctgcggcgtgtccggtggtgaggagggcgcgctcaacggcccgtccctgatgcccggtggcactgcggaatcctggaagaccctgggcccgatcctcgagtccatcgccgccaaggtgaacggtgagccgtgcgtgacccacatcggcaccgatggtgccggccacttcgtcaagatggtgcacaacggcatcgaatacgccgatatgcaggtgattggcgaggcttacgacattctgcgccgtggactcggcatggacgccgaggagatcggcgatgtgttcgaggagtggaacaagggcgaccttgactcctacctcatcgagatcaccgctgagattctgcaccataaggacgccgagaccggcaagccgttcgtggacgtggtcgtggatcacgccggcatgaagggcaccggtacctggactgtgcagaccggtctggagttcggttctccggtggccgcaatcggcgaggcagtgttcgctcgtgcgctttcctcccatggcgagctgcgtgaggacgctcagaaggaaggcctggccggcccgaacaagaccatcgatttggctggcgaagacaaggccgcgttcattgaggacgtgcgcaaggcgctgttcgcctccaaggtggtggcctacgcgcagggtctgaacgagattcaggatggagccaaggaatacggctgggatatcaacctgtccgaggtggcccgtatttggcgtggcggctgcattattcgtgcccagttcctgctcgaccgtatcaccgaggccttcaagggcgataacccgccggcctccctgctgttcgacccgtacttcgagaagattatcggcgaatcgcaggatgcatggcgtcgcgtgatcgtgcgcgctgtggaagccggtatcccgaccccagtgttctccagctccctggcctactacgatgggctgcgctccaagcgtctgcccaccgccctgacccagtcccagcgcgacctcttcggcgcccacacctacggccgcgtagacaagcccggcgtgtttcacactttgtgggccgaagagggcaagccggaaatcgaagcgtagcttcggaatttccggcttaggggagcctggtgggctccccggccctcttcggagcgaggcggctatgccgccgagccaacactgagcctcgccgcaggcaagtccctaattgcagggctggaggcgaagagggcaagccggaaaccgaggcgtgacgatatagctaggctcccctcagagaggggagcctagctacagctttacagcttagtgacggtttcttccgtggagaaccagatgaattcgtccactccgttggcgtaggacgacggataattcggattattcggcttcgaaaatacgtgtgccagcgaatcggccttactggcaccggcagcgaagaaccacgtgcggcgcgaactcgcaatcatcggagccgtcaaagaaacacgcaacggcggcatcttgggggagtgattcacacccacagccagccggtcggtgactttaacctcatcatggccggggaacagcgaagcgtaatggccatctggtcccatacccagaatcatcaggtcgatggtcggcttcgggccaagctcacggatgagctcggcctcgtaatcgcgtgcagcggcgtcaagcaacgcgtcgttggcagcgtcagcggcggcacgaacggcgtcgtcatcgctttcggcattggccatggcgtcggcaatctcgtcggtggaacgcacgtcggctgccatctcatgaatattcgactcgggcagcttgccgtcggccaccagtttgtccagtaacagtcggcgggcttccagcgcattgcggtcggtatcgtacgccggcacaaaccgttcgtcactccaccagaaatgcacgcgagaccagtcaatcgcctcggccagcggatcatccagtaccaatcccagtggttgcgcggccgagccgccggacagcgccacatccacgcgcgtgcgatgcgtactatccggcagcctttcagcaagcaaatcaagcaatgccagcgcaaaccgctgcgcgccggcctgaatcatcagatccatgtctggatagacgacaagtttacgagttgccataagtgttccttcacgtaaaaaagaccaccctcagtcagctcccgtcagcgggagccaatatgctcctcccgctgacgggaggtggcacgaagtgccggagggtggtcaaatgaatatgctcatcagtgacgaatcagatcccagcccttattgatgacatcggcgtaaatctcatccggatcgatgcgacgcaactcttcggtgaggcagtcctcaatcgtgcgtacgggaacggaaatcgtctgcggagcctgccccggcatggaaatcagtgcctgatcctcatacgggcgttccagtgacaccacgccgtcatcgcgagtcaggtacacgccggtcacagcctcggcatcgggtacgaattcggtttcgactggcactccgagcttgaggtgcagccatgcgcacagcagttccatcggcaggaagtcggccttgccggtcaccttggcagcagtgatgggcaggtgcggcggctgatccagcatggaggcgagcatcgcgcgccatacggtcaatcgggtccaggaaagatcgatgtcttctggagtccagttgcggcgcaggcgttcgatcgttgcctcgggattgttggagttcagggcgtcggtgatacggctgcgggccatcgcacccaacagatccttggaaggattcgacggtggcgtggtcggccaccaagccactactggtacatccggcaccagcagaggaatgaccagagtatccgggtgattgatcaggccgttgcgcgggcgcagaataataatctcgccggcaccggcatccgcgccgaagcgcacctgggcgttcagattggagtcattcgggtcggccgagccgtccgtcaggtcgactgccggattatcgcggttggcgctgacctcggcggcgacttcactggcattcggctcgtcgttggattcgctgctgtgtgcggtatcgggcacaacggcgatcacgcggcaaggatgctcgcggctggccgaattggccacctcaagcgcgtgctccaggttggtgtcgtcggtggcgatcagcagcgtcaatacacggccggtcgccgattcgccgcgctcctcgtgcagttgctcgattttgtgcgcaatctcgcgggtgcgagtgttcggcatatcgatgatcatggcatcctccagtggcggccgtcgcgttccagcatctcatcggcctgtaccggtccccacgtaccagcgcggtaggcctgcggctggccgagcgtggcccagaattgttcaatcggatcgaggatttcccagctcaggttcacctcttcggtggtcgggaacagaggcggatcgccgagcagcacgtccagaatcagtcgctcataggcttccggcgagttctcggtgaaggagcggccatagctgaagtccatgttcacgtcacggacctccatggtggagccgcccggcaccttggcgccgaagcgcatggtgacgccttcatcgggctgcacgcgaatcacgatggcgttcttgccgagttcgcgcacggcggtctgctcgaacggcaggtgcggggcgcgcttgaacaccacagcgatttcggtcacgcgcttgcccaggcgcttgccgcagcgcaggtagaacggcacgccggcccaacggcgggtgtcgatgtcaaggcggatggccgcataggtttcggtagtgctggaggggtcgatgcccttctcctcgaggtatccgaccacttcgtgcgaaccctgccatcccttggcgtactggccgcgtgcggtattggcggcaagatccttgggcagacgtacagcggagagcaccttggttttctcggcggtcagatccttggcggtgaagctcaccggctcttccatggcggtaagggccatgagctgaagcagatggttctggatcacgtctcgtgcggcgccgatgccgtcgtagtagccggcgcggccgccgatgccgatgtcttcggccatcgtgatctgcacgtgatccacataattggcgttccagatcggctcgtacatggcgttggcaaagcgcagagccagcaggttctgcacggtttccttgccgaggtagtgatcgatgcggaacacggagttcgggtcgaatacttcggagaccacgctgtcgagttccttggcgctggccaagtcatgaccgaacggcttctcgataatcacgcggcgccatgcaccttcggacgaacgagacaggccggacgcggccagctgcttggccacttgcgggaatgcgcgcggcggcaccgacatgtaaaaggcatgattgccgcgcgtaccgcggtcgcgatcaagctcctgcacagtggcgcttagacgctcaaaagcctcggggtcgtcgaacgtgccctgcacaaaacggatgccggcggccagattgcgccaggtcgattctttgaacggggtgcggcaatgtgcctgaaccgcggtcttgacgaattcgatgaaccgttcctgggtccaatcgcggcgtgcaaaaccggtcaggccgaagctcggcggcaataggccacggtttgccaagtcataaacggccggcaatagtttcttttgtgccaaatcacccgtgacaccgaaaataacgaggctgcacgggccggcgatgcggggcaatcggaggtcgcgcgagtcgcgcaggggattgctccagttgggggattcactcatgattattaagggtagtcgccggaggctatctatcgctagaggcgatatacgatgtgggctgcgatttatcgcacgtttgtgaagtgcgggcggggtaggagcggggtgaaggcgggagtccaagcgatggcgcggttcgagatgtgcgcgtgaacgccgtgcaggcatatcagcgtgctgccagcatttttccagtgttcgtgcgagtgttccaaagattggaatcagggcttttccatgtcagcccattgggagaaaatgcatatgaattagtaacacagtgtcaactttagatgtgaagtaattattatcatgcctcgatcagtgtcttcgtcgtcgtatcctcatgagtattcgaggcatgcctcccacgctgcaaagccgcatcgcccacatccacaaccgtgtaagcctcgccagctgcgccttgattggcaggccccgctgcgcttcttccagaatctgagtgagcggttgccgcaacgtcatcacggcaaggtcaagatacttaaaggttccgtatacacacggcgtcgcattgtggtgggctgcttgggcgtgctgctgttggtcgaattgttccagctgttctggccgtccgacaaattcttcccgctcgccacacttgacggtcatgccgtaggtgggcagagttcgcagcaggctgctgagacgcttaacgccgcaacattgaaacgcacagtaaagctgaccgataaaaccacaggcactacggtgtcgcttactgccaagcaggccggcatcacggtggattacacggaccgggccaaggcggcggccaagcattccgtggtcaagcgcattgttccgttctcctggctgttcgtgcacagcaccacatccgattccctgcccgatgcgctgggaacgtccgacaagcaggcgcatgaggatatgcgcaatgcttcggtgcaaggaacaaagggcgagctcaagatagtcagcgcggcacccggctacacctttactcctgcggatattcgttctgccgctggatcgagtttttccagcagcgctaccggcgacttggtcgcggcaaccatcgagatgggcatcgtgagccccacagtctctgacgacaccgccgagcaactgcttgacactttgaataaggcgctgagcaaggatgtcacgttcacctatgaagacggcacatggacagtgccggccaagaaaatcatcaatactgtcagtacgacagtgaatgcgcaagacaacaccaagctggatgttaccatcagcgaatccaaattaatgcggcagctcaaatccaaaggaatcgctctcaaggtggcaaagaaagccgctaatgccggtgtcgtacctgcgacgattgcggtgaaaggaaacgcctatcaagtcatagacgcgagtgccacggcggcatcgctgtcaggcatgctggccagcgggcagaatgcgccggttgccgtttcaaccaaggacttcagcaacgttgagttgtatgaaggtctgcccgccagcggcaccattgaggaaaagctccagcaattgttcggcgatgccgattatgaggtcgccgtctacgacctgaaaaccggcaaatccaagatccagattgacgcggataccgcgatgacctctgccagcacgtacaagctgttcatcgcttattcgatgatccatgctgtggaaaccggccaagtcacgtgggatagcgcgctcaatggcatgacgctgagttcctgcatggccacaatgatcattaattccgacaacagctgcccggaagcgtggctggcccgttacggcttcagtactgtcacccaacaggcgcatgatatcggagccgccaacaccaacttcgtgccgtacggcatgaccaccaccgccaacgatttggccacagtgctcaagggcttctacagcaactcgattgcctctccggattccacggaccagctgttctcactgatggaaacgcaggtgtaccgcgaaggtattcctgcgggcataggctcggacggcgtggtgcaggacaaggtcggcttcatggacggtttgctacacgatgccgcaatcgtgcgctccgataaaggcgactacgcgatggtcattatgaccgacagctcgagttggaacaaaatcgcccaagccagtctgctgatttacgagtctttgtgagttctgaaggcctgcggctgctgctggttttcgcaacgccgtagttgaaatatcccaagacggtgtgtagtttagtagagttgcccctctagctcaacggttagagcagcgtccttttaagtcgtgggttgtgggttcgaatcccacggggggcacgagtgaatccttggaatcgcaatggttccaaggatttttggttcgaccagcccggctcctagagtggtactccatgtcatgcaccacgattcttgtcggcaaaaacgccagctacgacggttccaccatcatcgcccgcgacgacgattcaggctccggccgttacgatcccaagcgtttcgtcgccgtcgcccctgaagaccagccgcgccactaccgcagtgtgctcagtcacgtcgaaatcgacctgccggacaatccctgccgttacaccatcgctcccaatgtgctgaacaatcgtggtgtgctggccgaggccggtgccaatgaacacaatgtggcaatgagcgccaccgaaaccatcgccgtcaacgagcgcgtgcttggagcggacccgatggtcgagctcaagccggccgttagcgagcccaacagccccgattatcaagccgaacagccgggcggcatcggcgaagaggacatcatcactctcgtgctgccatatgtcgccaccgctcgtgaaggcgtcgctcggttgggcgagctgcttgaaacttatggcacctacgaatcgaacggcgtaatcatttctgacgtagacgagatttggtacgtcgaaactatcggcggccaccattggatcgcccgccgcgtgcccgatgattgctacgccaccatccccaaccagctcggtatcgatgatttcgacctcgcggatgcattcggcgaacggcgtgaatacatgtgcagcgccgacctgcgcgagttcatggcggtgcatcacctcgaccgcacgatgggtgcgatgtcgggccgtttcaacccgcgtaaggccttcggcgccgccactgccaaagaccatatttacaacacgcctcgcgcttggtacatgcagcgtcatctcaacccgagcgaggactgggattcgccgtccgcccgctatacgcctgaatctgatgacattccgtggtgtcgcgtaccggaagacaaggtgagccttgaggacgtcgatttcctgctgtcctcacacttcgaaggcacgccatacgacccgtatggtacgaccggtacgccggaatcgcgccaccgttaccgtccgattggtgtgaaccgcaccggccatatggtggcgattcagattcgtccgtatgtgtcggctgccaatcgcacggtgatgtgggtgtcgttcggttccggcccgttcactgctgctgcgccgttctacgcaaacgtcaacgatacgcctgcctacctgcgtgacaccacgcccgaagtctccactggcaacctgtattggacgaaccgcctgatcgccgttgtggccgacgcgcactggtatgagacgaaccggttcatcgagggctatgccgagggtgtgcgcgcgttcggtcaccagcttgtcgaacgtacggatgcttcgttggccgctggcggtgaggtcgcgcacgatgtgccgaccgtgttggagcaggccaacgacgacatggccgactacctgcgcgaacacacgaccaagctgctgaatgacgtgctgtacacctccagcaacttgatgcacaacagtttcgcaatgtccgaccgctgggccgagtagcaaaacatcggttggtaatagttatgccccctgcttggcgtgtcagcggggggcaagccttggcctagttgaagccgacgatccgctcggcgatgagatagccgttgcgcacgatccaacggccgggtttgccgggcaaattgagcgcgcgggacatcagtttggcgcgtacatccttgccgatggccggtgaataggcgtcaatcgcgtcccacagctcggttttcttaacataattggccggatcgcgcgaaaggatcaggaacgccgaggtcacgcatgactcgattgccaggaagtgaatcatgtaccggtacaggccttccggcactgtgccgcgttcgggcgtggcctcggtcatcaaccggttgacgagccgcagctggtccacgcggcgaatcatcacgtcggtctgcacgctctggccctcacgcccgatgaagtagtgatagaacggcacatcgagatactggatgcgcttcacccacgggaacggctggtacgagtaatagaaatcgacgtagaacgtgtgctcgggcaactgcagcccggaatcgcgcaccacctgcgtgcggaaagtgagcgcatgcatgatgatgtactgagccaggccgaacttgcccagatcatcccagccgagcacgcggccggtctccatcacatgacggaagttcaccacgatcttgtggcgcttggtcactttgtcatacacatagttggtcaccagcatgtcgatcggctcgctggcctcacgttgcgcgcgcaacgtggccagaaccgtgtcgatggcctgcgggtcgacccaatcgtccgcatccaccaccttgacatacatgcctgtcgccgccgcgataccggtgttcaccgcgccgccgtgacccttgttctcctgatgaatcgcccgcacgacgcctggattggtgcgttccagcttacgcgcgtactccagcgtgccgtctttcgaaccgtcgtccacaatcagcacttcgaggtcgcgggtgtcgctcgccgaaagcagcgagttcacgcaacggtcgagataggactccatattgtatgcggggattacaaaggtgagcgtctttgccgtgttggtcatgaaagccttacgtcctcacatatttagtcgttctgttcagtttcctgttcaaaccgtagcacttcggcttccggctcggcagagtgttgcgcaacctgcttccctgaactcacattctgcaaccctgaatcttccctgagcgtgtggtcgaggtccgtctgctttaagggcgatgatgcctcgccgtccgggaccggtgtttcggcatcgatcccgcgtttggcccggcgctcggcctccttccgggccttgacgccttcaaacaacagctgcggcttggaatcgagccggctcaggccatgccatgccaggtccacgatgtacgcggccagctgctccttgctcaccttgggccggtcggcccagtactggccggtgaacacggtcatgcccaccagcatctgtgcgtagtatggcacgcccttaacggagagcttctgccgtttgaatgtttcggaaagaatatcttcaacgcgcacggcgatattgcccaacagcgagctgaacgagccggacggatcggtgctgggcgagtcgcgtaccagcacctggaatccttcggcgttctcttcgatataggtgagcaatgccagtgccgtacgttccacaatctggcgcggatttacggtcgggtcatccaatgcggcttccagcacactggtcagcgctcgcatctcacgatccacgattacggcgtacaggccttccttgccgccgaagtgctcgtacacaatcggtttggacaccttggcgtgtgccgcaatctcctcgacgctcactgcctcgaagcctttggcggcaaataatgcccgcccgatttcaatcagctgttcgcgccgctgcagcgatgtcatgcgtgaagaatgtgccataaaactccagcttagtcggcggctggaatcggcggggattccgtctgcgggctagacttggcagatatggatatgaatactgtgctcgccattgctggcgtgattgtggtggcgattgtcgtaatcgccctgagtgtgtggctgggcaagtcccgcaagcgcgatttggatcgtgcgatgggcaagactgctcccgatgataagcgcacccgcgatgccaaggccgctgccgatgcgcgactgacagcggaagctgaggctgccaaagagagcgagaaagccggaggtgctgcggccggtaccgctgcgacgggcaagtccgctgcggacgccgaatccgttagccctgctgccaagccggctgcggccgagtccacacccgaacccgccaagacggaaactccggaatcagtcggctcccgcctgacccggctcaaggccaagctcgccaaatccggcaatccctttggcaaagcgctgttcgacattttggccaaggacaacctgtctgagtctgattgggaggatgtcgaagacacactgctgctggcggacgtcggcgccgaggcctccgcgcaactggtcgacgatctgaaaaccgatgcccgcatcacgggtaaggccgaccccgccgaggtgcgagccacgttgaaggacaagttgcttgacctggttggccgtgacacggatcgtcgcctcaatgttgagaagccgggtgccaacaagcccggtgtcatcatcatggtcggtgttaatggcactggtaaaaccaccacggctggcaagttggcacgactgttcgtatctgaagacaagcaggttatcatgggcgccgccgacaccttccgtgccgctgccgccgatcagcttgagacatggggcgcgcgcgtcaacgtaccggtagtccgcgccgacaaggacggcgccgatccggcgtccgtcgcattcgaggccagtgccaaggccaaggaagcgaacgcggacgtgctcatcatcgacactgcaggtcgactgcagaacaagtcgaacctgatggacgagctcggcaaaatccgtcgcgtcactgagaagaacctgccggtggacgaggtgctgcttgtgcttgatgccaccaccggtcagaacggtatggcccaggccaaggtgttcgctgaagccatcggtatcaccggtgtggtgctttccaagcttgacggttccgccaagggcggcattgtgatcagcgtgcagaaggagctcggcgtgccggtcaagcttgtgggtcttggcgagggcccggacgatctggcgccgttcgatcccgaaggcttcgtagacggcattcttgcgtaagccaacgtccacgttgtgagagcgcaaaacgcgcgacttacctataaaccaagccccgaatcatgctcgaaacatggtcggggcttcgtcatatccgttggaatcgcgccaaaatttccccgagcggtcgcacgtacgcttccagccacgcttaacaatcgcgtaacttgtcgtaacgaaaccaaaacgcgaccggctttaactgacgaactgttagcccccataagggggacggcattgtagagacaaagtcgacgccggctgcgcaaagcccccggtgccctgaacgaaagagagggaggtagacatgggagcgattgattccggcaacaccgcatggatcctgacatccgcgtccttggttttcctcatgacgcctggtgtggcgttcttctacggcggtatggttcgtgctaaggccgtcctgaacatgctgatgcttgaggcggctgccttgtcagtcaccatgattatctggaccctgtggggttggtcgattgcttacgccggttccgacatcggcggcatcttcggcgatccggccagcggcttcctgctgaaggactccatggtggctcaggatggcgtgtttaccgccaccggtctgaacggcaacaactacccggtttccgtggacgttgccttccaggtcgctttcgcgatgattaccgtcggcctgatctgcggcgccatcgccgagcgtgtgaagtacagcacctggatgatcttcgtggcgctgtgggtcactttcgactacgctccgatggcccacatggtctggaacggcggtctgctgtctgctgacggcgccatctccaaggccatcggcgccgccgcccacgatttcgcaggtggtacggtcgtccacatcaacgccgcagttgccgccctgattatcgtgctcatcatcggcaagcgtaagggcttcggcactcaaccgttccgtccgcataacgtgccgttcgtgatgctcggtgccttcctgctgtggttcggctggttcggcttcaacgccggttccgccttcgccgccaacggcacggctggttacgcttgggtttccacttccgctgctaccgccgccgcaatgctttcgtggggcttcaccgagaagattcgctccggtcactacaccgctatgggtgccgcttcgggtatggtcgccggcctggtcgccatcaccccggccgccgatgtggtttccccgctgtgggccatcgtgatgggtgccatcgcgggtgttctgacctgcctggcttgcggtctcaagttcaagttcggttacgatgactccctcgacgtcgtcggcgtacatggcgtgggtggtttcaccggcaccattctcgttggcttcttcggcgaaggcaccggtctgctggctggtggcgactggcgtcagctcgtcgtccagctggtcatcgctctcgtcgccatcctctactccgcggtgatcaccgcgatcatcgccttcgctctggagaagaccattggttggcgcgtcaccgaggcccaggaagtcggcggcatcgaccttgccgaccagggtgaacgtgcttacgattttgctggtactgccagctccgttctcaaggaggtgaagtgaaatgaagctgatcaccgctatcattcagcctcataagctcgatgacgtcaaggaggccctcgcggccgccggtgtgcacggtctgaccgtgtccgaggctaacggctacggccgtcagcgcggtcacactgaggtctaccgtggcgccgaatacaccgtggatttgattccgaagattcgcattgaggtgctggccgatgacgccgacgccgagacgctggtcggtgtgatcgttaagtccgctggctccggcaccatcggagacggcaaggtgtgggtcgctccgcttgactccgtgacccgcgtgcgtaccggcgagaccggttccgccgcaatctgataaggcgtccgttcccctgagagaggttcgggctatcaaatagacagatccccgcacgctgccgtatggccgtgcggggatttttgtggtggttggggtacttggacttcaaggggctgattcatcccgttccggaggtctacttccgtttcaaggggctgttggtgaagtatccgcgctctgaaaatggcggaatgacgtagagctcgatctccgaataagctgtatacgaattggtggcagccccttgaagcggagatagacctccgggaaacgacaaatcagccccttgaaacgcgaaatgacataatcatcgatgaaagatggagcgatggcgtcagcagtagatggcttgaagcaacgattcatggatatgagccagccggatgacgctggcatctaccggaatggttcagccaagcgtaaggcccgcacggaattggccatgcagtgcctcaccgagttatggcaagaagcctgcaaaggtgtttcattcagcgtgcccgattccggtatcggcttcgcttcggtcggttccctcgcccgagggcagctcggccccagctcggaccttgacctggtcatcatctatgagccccgcgccctcaacgaccagcaactcaatgaactggccaataaactttggtaccctctgtgggatagcggcttggacctcgaccattcgattcgcacccgcgcccagtgcgaggaggtcactgatcatgacctgcccgccgccatggggtggcttgatgtcaaacctatcgtcggagatgcggaactgatacagaccactgccacctccatcttggaacgatggcgcaaggccgcgcgcaagaggctgcccgagctgctcgactcggctaaatctcgactggacgagttcggccgtcttcaatacatcaatcagcccgatatcaaagaggcccgcggaggcttgcgtgattcggtgctggtctccgcgcttgccgcttcatggctggccgaccgcccgcatggcatctacgatgaggccgttgaacgcttgcttgacgttcgcgattgcattcatctggcggccgggaaagacaccaatctgctgcttacgccgtatcaggccaaggtggctgccatgttgggtcttgccgatccgacgtggccggagaacgagcgtgccgcctattccattgacgatctgcagacgctgctcgcccgcataggccggcgcatttccttttcgctggattccaccgcttcgcgtgccgaacattcgctcacccatgaaaagccgcgattcgcgttcttccagatgttttcgcagcgcgcaggcggcagacgcgaggctccgcaattcgatgtggtggctcccggtgtggccaaacatgagggcgaactggtgttggcccccggcgtcgatcctgccaagaatccgacattggcgctgcgcgcggctgtggcgtccggagaatttgggctgcccatcaacccgtccacactcgtcaacctcaaaaactgtccgattcatgacaaccaatgggatgatgagtcgcgcgaactgttcgtccggctgctggcctgtgggcctgagttgttggatgtgtgggagagcattgactttgtggatattcccggccggtggatgcccgaatggctcggcatccgcaatcgtccgtccgcttcggccgcccaccggtacaccatcgaccggcatatggtggaggtcgcgtcgcggctgacccgcgagacgccgtccggcagccgatatgacgacgaccatttcaaggcattgcttctggcgggcatcacccacgatatcggcaagcgagcattcgtgcgcgatcatgccgccgaaggagctcgccatgtaccggtgattctcaaacgtatggggtatgcgtcggagattatcgattgggtcaccgtgctggtacgtgagcatctgacactatccgaatatgccacaggcaaggatcccaacgatccagccgtggctgaggaactggccgaccgtctgcaccataacaagctcttgcttgatatgctgttcgatctgacccgtgctgatggctcgtcgttgggtgccaccgccggcgagagcatcaccaaacaatacggctggtccaagtggcgtgaacagattgtgcatggcatgtacgcagccgtgcgcgccgcgatgtagcaatccaagtcccctctgacgaggggactcccggcgcagccgggtgggggagagaagtgcggccgtgattgttgtgaactacttcatccagacgtccgaccgcacgcgcagtccgttgaacagggctcgtccgcccatcagcaccacgttgaacgctgcccagagcatcgcggtccgtgacagatcattaggcattatcggtgtcacgatactggccaacaccagtatcagggcaatatagaccacagcagtcaatgtgcaggtgccggccagatagcggtaatcgcgcgcaccaatcagaatgccgtcaatcgccatcatccagccttgtaaggggaagaacacgcccgtagtcaccatgccaacggcaatcagtatctgaacatgcggcgtgggggagaacaggtgtccggcaaatagtccgactattgcaaagaccacaccgatgattgcgccggtcaccagtcctgcacgcccggttgctcgggtcaattgacgggctcggcttacgctgcccgcacccaatgcggtggccacaagcgtttgcccggcaatacccactgaatccagcatgttcatcgcgaaattccaagaggagttcaccgcttgaaaaccagcgagcacagaggtacccatgcgcgccgcgcaggcgacggtagccaccatcgccgcgcgaatcgccagcgtgcggatgaacaatggtagtccgtcgccgcctgctgcagcgatgccggcaatccgcggtctgaggcttgctccgtccgcgcgcgcccagagaatggccggcgcgaccagaaacagtcccatataccattgcgctatcagggtcgctatgcccgagccggcaataccccagtgcagcacgattacgaacagcacatcaagtaccgcgttcattacggcgccactcaccgccgcaatcagggtgatgcgcactttctgcaatccgcggaagatgccgttcgctgcgtataccagcagcatgccaggggcacccagcataatggcgcgtgtataggcgaccgcctggtccaaaacagcaccttgtccgcccagcgcctggcataacggctcggctccggcgaataggccaagactcagcacgatgccgatgcccaaagccagccaaagtccgtcgatgccggcctgcaagccttcgcggcggtgccccgcaccgagcagatgcgccacttgtgcggtggtcgagtaggccagaaaaacgcatagcccaacggcggtcagaatgatggtggagccgatggaaagacccgcaagcgccgtgtctccaatatggccaacgatggccgtgtcgataagcacaaaggtcggctcggcgatgagctgaccaaaggtaggcaatgccagcgcgatgatgcggcgattgacggttcggctattgccgtcggcggaggaaggatctatgtgcacgctcacacgcataccatgcattgtttcatcgcgcaagcagctttaaggactacatcaagttatcccccctttgtccaccaagttatcccccatgtgtggataactcagtggattatccccaaagttatcccccaaatgtggataacttttttctctatccacatttcagcttccgcgtgttgccgcgatgtctcattgatgaataactgctgaattggttgtgcataaaaacgcataagcacataccaatatgtaagtcatcgcatcttccctttttgcggtggcgaaatacggagtggaggcttctaggggcggtatcttccggcgctcgcatattcacgtaattacttcgttaccgtacgatatcttccgtcgggcgctgctctctctatacttggtggctatggcagaaggaaacgacacttcatatcaaggcggttactcgggcggcgccagctatcagggcggcgccgatcgtggcagccgtagcggggcatccggggcgacagctgctggcgacccgatttttgaccgcgtgccgccgcatgacgacgacgcggaaatggccgtgctcggcggcatgctgatgagcaaggatgccatcggcgaggtgtcgcagaccatcgacgtgaccgacttctaccagccgaagcatcagacgatatataacgccatcattgatctgttctccgccagccagccggtggatgtggtgcttgtggccaaccagctgcttgccgatggcaatcttgagaaagttggcggcgcggattatctgcatagtctggtggcctccgtccctaccgctgctaacgccatgtattacgccgaaatcgtccaccaaagggcgattctgcgtaacgtgattgctgccggcaccaagattgcacagctcggctactctgccgaaggctcacaggccgaggatgtggtcaatcttgcccagtccgaaatctatgagatgtccatgggcaaggtccgtcaggactatgccgccatcggcccggtggtgcatgacgcgctcgaccagttggacaaactgcagaacggtctggtccagaagggcgtgccgaccggcttccgagacattgatgacgtaacccaaggtctgcagcccggacagatgatcgtcgtcgcaggacgtccggccatgggcaagtccacgcttggcatcgacttcgcccgtgccgcagcgctgcatcacaacatgacttccgtggtattcagcctcgagatgagcaaggtggagcttgctcagcgcattatctccgccgagaccaatattccgatggccgccttgcgtcgcgcggacgatatcacgcccgaacgctggaacacgttgaacaatttctggaacaagatgcaaaacgcgccgttcttcattgacgacagcccgaacatgagcctcatggagatccgtgcgaagtgccgccgactcaagcagaccaatgacctgaagctcgtggtcatcgactacctgcagctcatgacctcgggtaaagccgtggaatcccgccagcaggaggtttccgaattttcccgtgccctgaagctcttggccaaggaactcgaagtgccggttgtggccttgtcccagctgaaccgtggcccggaaatgcgtaacgacaagaagccgcagctctccgatttgcgtgaatccggttcgatcgaacaggacgccgacgtggtgttcctggtgcaccgcccggacttctatgacaaggaagaccgtcccggtgaggccgacatcatcatggccaagcaccgtaacggtccgaccgagaccttccacctcgccttcctcggcgccacgtccaagttcaaggacatgccgcaggattacaacgccaatcagggggtgtgatcatgtttgccaccgtggctgtaggccgattgattcgcttcgcttcccgcatcaccaaacatggtggttcggcgttgccaggcaaggtcgtggagaaaatcgaccccggattcttgtctcgcacactggatcagctgccgctcggcgtggtactggtttctggcacgaacggcaagaccaccaccacccgcatggttgcttcgatgctttctgatttgggattgaaggtattcaccaatcccaccggctcgaacttcgtgcgtggcgtggtctccgcgttgctcaccgaggtgaatcttgccggcaaactggacgccgacatcgccgtgctggaattggatgaggcgtatgccgtgcatttcgtgaagcaggtcaagccccgttatgccctattgctcaatgtgatgcgcgaccagcttgaccgcttcggcgaaatcgacacgactgcccacctgttaagccatgtggctgaagctaccaccggaaccgtggtgctcaaccgcgaggatccgcgtattgcagcgctcgctgccaaagtgccggccggcactgcggtgtgctacttcggtcttacggacgatttgaagcacttcttcccgtccgatgacgatatggccacgacggtaagtgcggaaacgacaaccacccccagtccgactgtgtcggacagcccccgccagcgggggcgggaagatggcctcccgcccgcgggaggtggcgcgtcagcgccggagggtggtcagcatgaccttcccgccgacgtgaccctcaccgcggttggtgaccaccatgccgccttccacatggacggccaagactacgccaccgatgtcaaactcgaaggcgtctacaacctctacaacgccgcagccgcactggctgtggcccgtgcggtaatgcaagacaacactgctgccgccaaaaccgtagcctcaaccaatgcctgtgccgtatccgcagacgatctcatcgccgcggtttcccgcgtcaccccggcgttcgggcgcggcgaggtcatcgatgtgaacggatccccggtcgagctactgctggtcaaaaatccaatgggcttccgtctctcgctggccagcttcagtccggccggcgcggacaccatgatcgccatcaacgacgaatatgcggacggacgcgacatgagctggctgtgggatgtggactttacctcactgcgcgagtccggtgtaaacatggtctccggcgtgcgcgcttgggatatggcattgcgactgggctacgaccaagtgccggtcgccaatacgaacaccgacctcgagcaggcggtcaccgcattcgtgaacaccaaccccggcaaacgcaaacacgtctactgcacgtacactgccatgctcaagacccgagcagtactgggccgcatcaccgaagtgcgagacgcaggcgtaggcaagtaaccaccctccggcgcttcgcgccacctcccgccagcgggagagtagaaatagcccggatcgggaactctccacttcccaccggcggggatatcgacaaggagaacgtgacatgagcaagataatcgacatcatgtccctgtacccgaaggacatgaacatctacggtgactcgggcaatgtgctgactgtcagccgtcgactgagcctgtatggttatgagccggttattcaccaatacaatcagggtgatgactggccggagcatgtcgatctcattctgggcggtggtggtcaggacaccggtcaaaagaagattattgatgacttctacatgcgtgccgacctgctgcgctcgctggccgcagacggtacccctatgcttatgatttgcggcctgtaccagctgttcggcgaatacttcgaaaccgtggacggtacccgactggacggcatcggcgtcatcggtgcctacaccgtaggccaggacgtgcgcatgattggcaatctggttgagcactctgatcaattcggcgatgtgattggttacgaaaaccactccggccagacattcctgcgcgacggcgtacagccgctcggcatggtcgatcaggatggccgtggcaacaacggcgaagaccataccgagggcgcgcgcgtgcacaacgtgatcggcacctacatgcacggctcgttgctgcctaaaaaccccgccatcagcgatttccttatcgaaaccgccgtgactcgtcgttacggtacgttcgatacgtccgatcagacccccgaacaggccaaggaactcgcccggctcgatcaagtggccaccaacgcgcgcaaggctgccgccgaacgtcctcggtgaggcctcggtaagtaccaatcagcgaaaaaccagccgaaatcagtctgagggtctagtacattgccctgctgtttgcgctaggcttggtggtacgagacatggcaccaggccatgtcggacctcgaaggaggggtatcatggctgattttgatttgggcgatggcctgcgcaaggtcctgctggcgggcatcggtgcccttgccaccggatatgagaagagcagcgagcttgtcgatgagctcgtcaagaagggcgagatcaccgttgagcagggcaaggccctgaacaccgagctcaagcgcaaggtgagcgagacggtggatgacgtcaagaaggccgctgccgaagccggcgacaaagctgctgccgcagccgacaccagcgccgccgacaagcccgctgacgagggcaaggccgagtgaccaagcccacacgcactacgccggaatcagagtcgaccccgctttccagcagggtcgaccctattctgacgcctgcgaaagccgaacgtgaggcggcagcgaaccgattcgccgacacgtcggacacgctcaagcggaccgttgacaaggcgacccccagcgtatccgacgaaacgctggcattgttcggacgcaggaacgatttcgccacgcgctaccatctgacgcgccgtggcaagatcaaacgactcgggcagatcaccagaatcgtcgagcaatttgacgtgctgcacggcctgactccggtcaaaatgcgcctcatgttcgaggcgctcggccccacgttcgtcaaagtgggccagattctgtcgatgcgctccgagattctgccgcaaagcttctgcgacgaactcgccaaactgcgcgccgacgccgacccgatgccgtattccacggtgttggatgtgcttgccgccgaatacgggcgtcccgccgacgaggtgttcgcgcatatcgaccccaagccgttgggctctgcttcactggcgcaagtacatcgcgccacgctgaaaaccggtgaagatgtggccattaaagtgcagcgcccgggtgtgcgcgaaatcatggcccaggacgtctccatcatgcgctccatagccaaggccgccactaaggtgattcgcacctcacagatcgtggacctgaagggcgtggtcgaggagctgtgggacaccttcgaatcggagactgactttctgatcgaggcccgcaatctcgccgaattcaagcgtttcgccgcccgattcaaatacatggactgcccgacggtgtacgccgaactgtgcaccgagcatgtggtggtcatggagtacatcgacggcatctctgtctcccacccgggccagctcatcgacgccggttatgacttgaaggagatcggcaccaagctcgtcgacaattacgccacacagattctcgacgacggcttcttccacgccgacccacatcccggcaatatcctcatccggggcggccagatcgtacttatcgacctcggtatgaccggtcggctcgaccagcgcacccgtgcagtcctcaaagaaatgattttcgccgtcgccaaacaggattcgcccgctctggccgaggggctgctgcgatttgccggcaccgaggccgatccggaggactatcccgcgctattggccgatctggacgtgatcgtcaaggaattcggcaccgtggatctggccgaactggacattgccgctttcctgaccgcactgacgcagatggccggccgccacaacatcgaggtgcccagtacggtgaccaccgtcggccgcgcgttggttacgctcgaaggcttactggacgagttcattcctgatgtgaatatgatcgaaatcatttccgaccatatcgccacgtcgaaatcgctgaagaacgccaccaaagacgagatcaagtcgctgggcgttgaggggcatcaggctttgcatgccacgctcagcaccatgaccgaactcaagaccgtggcccgtatgctgacccgtggtcagttgcgtgtcaacatggaactggtcggctccgaagagccgttccagctgctttcggatatggtgaatcgtctgacgatggccctgattgtggtcggtttgttcgttggctcgtcgattgtctactacgccggcatgaagccgattatcttcggcattccggtcatcggcttcatgggctacgtcgtggccttcgccctcggcgtatggatcgtcatcgacatctacttaaagggccgcaaaaccaagaagcggtagggtatcgattgatatcagtccagcgggagggtggattcgcgctggataaggcggcagggtacgtagtcgacaccgtgatgcgggttgccgtcgatggcatcgaccaagtatcatgccgcacgccgtccgatggaacgcgctgcttggtttcttcgctaatgcggggcttgttgtgcagtgccttggacgcagtggccaaagagactcccgccaaggcggcaacgtcttcgagctgtgccgcgcgtccggtcaatgtctgggccatcatgcctcgattcctcgtgtgatcaacggtgccccgaggctggcgtcgtggttctcctgatcccctgcgccatcctgttcctcgccttgcggaagtactacgtcaagggctttatggctgggagcccggtgggctcccaacaagctccaggctgagacgcgacagcgtcgaagccaatattgagcccggctgaaagccggtccttaattgcagggccggaggcggtgcagtgaagggccttaagaacaaggacaatcatgaacgttacaatcacttccccgttctggaagcggcgtcgcgaccagatcgtcgaatccgtcatcccctaccagtggtgagtgatgaacgacgaaatcgacaccacagtgcccgacgacccggccggcaaccagctggctgacaacaaaagccacgcggtcgccaatctgaaggttgtcgccggcgaattggacgacgaattccacggcatggtgttcaaggattccgacgtctacaagtggcttgaggaagccgcttatgcgctggcctaccatccggatcccgaactcaaggcgctgtgcgatcgcacggtcaatctcatcgcccgcgctcagcagccggacggctacttggacactccatatcaggtcaagtccggcgtatgggccgaccgcccgcgcttcagcctgattcagcagaaccacgagatgtatgtgatgggtcactacatcgaggccgccgtcgcctaccatcaggtgaccggcaatgagcaggcccttgaggtcgccaagaagatggccgactgtctggacgccaacttcggccccgaagaaggcaagattcacggtgccgacggccacccggagattgagctcgccctcgccaagttgtatgaggagcccggcgagaagcgttacctgacgctttcccagtacctcatcgacgtgcgcggccaggatccgcagttctacgccaagcagctcaaggcgttgaacggcgacaacatcttccctgacctcggcttctacaagcccacctacttccaggctgccgaacccgtgcgcgaccagcagaccgcggacggccacgccgtgcgcgtcggctacctgtgcaccggcgtggcccatgtaggtcggttgctcggcgatcaggggctgatcgacaccgccaagcgtttctggaagaacatcgtcacccgtcgtatgtatgtcaccggtgcaatcggttccacccacgtgggcgagtcgttcacctacgactacgatctgccgaacgacacgatgtacggtgagacctgtgcttccgtggaccgctacatctacaccgagcgcgacggtggcaagaccgtgctcagccaccagttcatcgccaataaggccgagttcgcttccggactcacggttgaacagcgttcggacttcccgtggaacggtcacgtggaatacacggtgagcctgcccgccagcgctacggacagctcggtccgattcggactgcgtatccccggttggtccttgggctcttatgcactgaccgtcaatggcaagtctgccgtggctcagcctgaagatggctttgtgtgtctgatggtcaacgcgggcgatacgttggagcttgatatgcccgtcaagttcgtgcgtgccaactcccgagtgcgttccgacgccggccaggtggccgtcatgcgcggcctgctggtctactgcgtcgagcaggccgacaaccccggtgatctgtggaactaccgtttggccgatggcgttgatgccgctgccgctaagaccgagttccagtctgatttgctgtgcggtgtggataccgtctcgttgccggctgtgcgtgagcaggctgatagcgatgacgccgcgctatatgcgtccgccgacgttgcgccagccactgaagcagccatactgacactggtgccgtactactcatgggccaaccgcgaggtcggccagatgagggtctggctcagacgataattcttacccctctattctccttccattgggtgagcctcccactgctgaacagcggcgggaggctttctcatatgcggggtatgatggggtgtcgattcactggggagagcaataatgacggcatatatgaatcacaaggacctcgccaacgagatcatcgatcaatcgcgggcacaggagatcacggacggcgtgcatcgggtgcttgatcgtatcgctgcggccgaatccatggccgggcgggaagctggttcggtgcagctcttggccgcaaccaaaacgcgtgacgttggcgagattatggccgcgattggtgccggtatccatctcatcggcgagaatcggccgcaggaggttacggtcaaggctccgggattgacgcgcttgctttcggagcgtggaatgtcgttgggcgtgattggcgaggctggggctttcaacggcgcagcggcatctggcgctgcgaacggcgtcggtgattccgattcgactggtgcatcggccaatgccgcgaatcatattccgttccatctcatcggccaattgcaggccaataaaatcggcaaagtgctgccggtggtgaacaccatcgaatcggtggattccatcgaactggcggagaagattgcgcgccgcgccaccatgcgcggcatcacggtcggagtgctgctggaggtcaacgaatccggcgaggaatccaagtcggggtgtgctccgagccatgccatcgatttggcgcagcgtatcggtgccatgggcggccttgaattgcagggactgatgaccatcggcgcccatgtggacgacgaacgcgccattcgtgcgggctttgcgcatctgcgccgtacccgtgaccagattctggcctccggtgcagaaggcactgccagctgtaaggagctttccatgggcatgacccacgatatggcctatgccatcgaagagggctccaccatcgtgcgcgtcggcaccgccatcttcggcgagcgcgcttttatctgaggtattcctagttttatttgtctgttagcgacagaattttaggaaagaatcggcttcgtcctgaaatcctgtcgctgacttcgtcttagtgacaggatttccggaaatgagtcctatcttcctaaaatcctgtcgctcagttgtgctcagtgacaggatttcaggaagagtgggctcatttcctaaatttctgtcgctaagaggagctggtaatacgaataaggggttataggaactaaacgtggtgttttagactctggtttccttggtcctgaggtggcctatgagggctcttatgtcaaatgccgggctccggtcagcacggccgcgacttcgcgtggcgaggttgttgcccgtccatcgcgtgggcctcgatcgatccggtggccgcgtcgccgagattatggatggccttggcggaggcaacgagggcgtcgaaggcgtcgggaatcagagacgggtctccacggagtgcatccgcgacggcgagggtgatcaggacggccgcgcgggccaggcccgcggtgagtgcgaaatatcgtttcatgcgcgggggtatgcgtcacgtccgagggaggcgtctcgcggatggcgctattccgccgaacacgccgtgtgagcgggcggcatgccgcgctaatcacccgatccccaggggacgtgggcgtggaattcgtcccaggcgatgccggtgccgtattccgggaccccgacgccgacgtcgtcggcgcttccggccgtggatgccctcgccggcttccgttgttcgggacggatgagcgacgatggcttcggattgcggcttttcatgtagcacatccattcgcaggcgcgtctcatgtgctcctcgggcaggccccgatggttgaggagcatgcgtttgagcggcgagttgacgccgccctccaatcggttcgtggtgcgcgccaccgggccgacggcggtcagtgacgggtcgaggaacgcgaacagcctgccctcgcggaacagcttttccagtcgccgatagcagcggcgcagctcctggtgggtccaccaccattcctgtttggatgccttcgggttcgcggggtcgtccctcgcataggtgcgttcggcgatgaagtccctccaccggatgtgccacgcgttgagcgcctcgccccaccgggccgccgcctccgtatcacgcacggcggtcagcttgtcggagagtttcttgagttccctgccggcctcgagcctcggccgcgaggtcaggtcggtcctcgtgttgcgctgcacgtgcaccagacagcgctggatcctcgtgtccggccacgtctcccggcatgcgctctcggcgccgcgcagcccgtcggtgatcagcacgtccggcgcggggatgcgcgaaaacagcgccatataggcggccttcgactcgttcgagcaccactggatgcccagcacctcgccgctttcgccgtcgatggcgacgatcaggcaccaatcgtggttcatgtacgtgccgtccgccatcaccgtgtgatgtctcgccgagcacggcgggatctcgggccggatgccccagcaccattgcacgcgtttgcggaacatgcgcgagcccgtccccatgtcggcctgcctcctgccggaaagcagccatccgaggaagacgcgcaggtcggcgtcgagtctctcgtcgggtctcggaacggtggccccaagcgaacaggccacgcatttccaacgctgggagccggccctcgtcctgccgttcttcctcatcgccccgccgcagaccggacacaaccgcgcccttttcgatttcgtcctcatgcgcccatggaacaggcaaagaacggcagaatcacggatctttaatacgacgtcacattaaagccaccccaacacgcctactcccgcaaggccaaacccggaacataaacaccacgtttagttcctataaccccgaataaggtgtcgcgatacatagaaaaggtcgtcgcaatcaagtgacgaccttatgaatatcgaaatagagcaatcacgcgtagatattgcgcggacgcatgtcctcgggaagcccctccagcagaatcgccacggaaccttcctcgaacacggaacggataccggcggccagcagaggcgcgcaagacagcacggtcatattcggcagacgcttttcctcgggaatcggcacggtatccatgaacacgatttcatgagcgccgcaacgagacagccgttccacagccgggccggagagcaagccatgggtggcgaccagcgtcaccgacttggcgccggattcgttcagggtgcgcacggcctcgcaaatagtgccggcggtgtcgaccatatcgtcgatcaccacacaatcgcgaccgtcgacatcaccgatgatgccgtgtgcctcggcgtggttcggacgggtgatgtcgcgctgcttatggataaaggccagcggcaggttgcccaacttggcggcccactgctcggacaccttgatacggccggcatcaggggagacgatggtggtgttgttcaggtcaatggcggaacgcacatagtcaagcagcaccggcatggcggtcagatggtcgaccgggccatcgaagaaaccctgctcttgggcggcatgcagatcaaccgtcataatgcggtcagcgccggcggaacggaacaggtcaaaaatcaggcgagcggtgatgggctcgcggccgcggtgcttcttgtcttgacgagaatagccaaggaacggggccaccacggtaatcgacttggcggaggcgcgcttcaaagcgtcgatcatgatgagctgttccatgatccacttgttgatatcgcctgaatggcactgcagcacgaacacgtccgcaccgcgcaccggctcggtgaaccgcacgtacatctcaccgttggcaaagtcgtaagcggtggtctcgagaacctcagtgcccaggcattcggccactttctcggccagctcggggtaggcgcggcccgtgaccaaaacgagtcgtttatccggagtgccttcaagaattgccgacatgctttcgcatccttttgtgttgcagtgtttttagccttaaccagtgtactagcaccccaccgcagcgcgtgccgtgaagtggggctgtgttgtaagagtgctgcaatcgttgatgaacatgcggcactgtctcgccctgaccataggataggcaagttgctcacagggtggagtgcatctgcatcaccctatgattaacacgcatacacactcctgccacggaacgtccgtggccgaatagtccgaaggaggtgggtgatgtctgcgcacaagtacgaactgatgttcatcgccgatcctgagctggatgagcgcggtctgaagaagctgaccgagcagtatctggaactcgtcaccaaggaaggcggttctttcgatgagcccgattactggggccgtcgcaagctcgcctatgagattgccggtaagactgaaggcaactacgtcgtggtgaagtacaccgccgagcccgctaccagcgatgagcttgaccgtgttcttaacctcaacgaatccgtgatccgtacgaagattcttcgtaagggctgaattaagcgttaagtcagctgaatagctggtaagtaagaaggcaatggcatggcaggcgaaacgattattaccgtagtcggtaaccttacccgcgatcctgagctgcgtactattggcagcggttccactgtggtgaacttcaccattgcggcttccactcgtcagtacaaccgcaacacgaatcagtgggaggacggcgatacgctgttcatgaactgctcggcttgggatggtcgtacttcgtcgttggcctccaacatcgccaacagtctgtccaagggcatgcgcgttatcgcgcagggtcgcttgacccagcgttcctaccaggcccaagatggtacccagcgcacggttgttgagctgcgagtcgatgaaatcggcccgtctctgactcgtgccactgcacaggtgacccgtcaggctagccagggcggcttccagggtcgttccaacggcggcttccaaggtggccagcagcccggtcagggctacggcaaccagggtggctatcagggcggttatcagggtggcgctggatattcccagcagtctgccccgtccaacccggccgcacagtccgctccggcaactgatccgtggagcaacgccggctcctctgattccggcagcttctccacgttcggcgcttcctccgatttcggtggcggtgacgattccgatccggagttctgatcgatacttacccgctgattagcagcaatcaatatcaagatttacaaggagaacatcatgtcacgtaagaggccgcaaccgccggtcaagccgttcaagaagaagccgaaccccttgaaggccgccaagatcaccgagatcgattacaaggacgttgcgctgctgcgcaagttcatctccgatcgcggcaagatccgttcccgtcgtatcaccggtgtgaccgttcaggagcagcgcgaactctcgaaggctatcaagaacgcccgcgagatggctctgctgccgtacgccacctcgggtcgctgagttagggaggctttgaacaatggctgaaactaaggttattcttacccagaccgtggccaacctgggccactccggtgacgtcgtcgacgtcaagtccggttacgctcgcaactacctgttcccgcagggcctggctttcgcctggaccaagggtgctgaggctcagattaccgctatgaagcgcgctcgtctggccaaggccgttgctacccgtgaggaagctattgccgccaaggacgctatcgagggcactaccgtcgagatcgccgccaaggtgtccgagtccggcaagctgttcggtggtatttccaacgaggctatcgccatcgctctgtccgacaaggctccggtgaacccgaagtccatcgaggtcgagaccatcaagaccaccggcgatttccccgccaaggtggccctccacccggagattaccgcttccttcttcgtgaaggtagtggccgagtgagctattccggccttgcgctggaatctttcagactgacagtctgagcttaagcattgaaccccgtgcggcgattgccgtgcggggtttttcgtgaattgcggcaagtttttttcgatggtgtgctgattgataatcggctcgtctacacgcgacacgccgaagcttgcgagagtctcagatttgagtatatttatcacctgttgcatgaaacactgcagcgtctaaccaagcccctgtagctcagttggttagagcagctgactcttaatcagcgtgtccagggttcgaatccctgcgggggcacagttcggaaggctccggtcgattatcggccggggtctttttgttttccggcttaattctgctgatgaaatccgggttataggaactaaacgtggtgtttatgttccgggtttggccttgcgggagtaggcgtgttggggtggctttaatgtgacgtcgtattaaagatccgtgattctgccgttctttgcctgttccatgggcgcatgaggacgaaatcgaaaagggcgcggttgtgtccggtctgcggcggggcgatgaggaagaacggcaggacgagggccggctcccagcgttggaaatgcgtggcctgttcgcttggggccaccgttccgagacccgacgagagactcgacgccgacctgcgcgtcttcctcggatggctgctttccggcaggaggcaggccgacatggggacgggctcgcgcatgttccgcaaacgcgtgcaatggtgctggggcatccggcccgagatcccgccgtgctcggcgagacatcacacggtgatggcggacggcacgtacatgaaccacgattggtgcctgatcgtcgccatcgacggcgaaagcggcgaggtgctgggcatccagtggtgctcgaacgagtcgaaggccgcctatatggcgctgttttcgcgcatccccgcgccggacgtgctgatcaccgacgggctgcgcggcgccgagagcgcatgccgggagacgtggccggacacgaggatccagcgctgtctggtgcacgtgcagcgcaacacgaggaccgacctgacctcgcggccgaggctcgaggccggcagggaactcaagaaactctccgacaagctgaccgccgtgcgtgatacggaggcggcggcccggtggggcgaggcgctcaacgcgtggcacatccggtggagggacttcatcgccgaacgcacctatgcgagggacgaccccgcgaacccgaaggcatccaaacaggaatggtggtggacccaccaggagctgcgccgctgctatcggcgactggaaaagctgttccgcgagggcaggctgttcgcgttcctcgacccgtcactgaccgccgtcggcccggtggcgcgcaccacgaaccgattggagggcggcgtcaactcgccgctcaaacgcatgctcctcaaccatcggggcctgcccgaggagcacatgagacgcgcctgcgaatggatgtgctacatgaaaagccgcaatccgaagccatcgtcgctcatccgtcccgaacaacggaagccggcgagggcatccacggccggaagcgccgacgacgtcggcgtcggggtcccggaatacggcaccggcatcgcctgggacgaattccacgcccacgtcccctggggatcgggtgattagcgcggcatgccgcccgctcacacggcgtgttcggcggaatagcgccatccgcgagacgcctccctcggacgtgacgcatacccccgcgcatgaaacgatatttcgcactcaccgcgggcctggcccgcgcggccgtcctgatcaccctcgccgtcgcggatgcactccgtggagacccgtctctgattcccgacgccttcgacgccctcgttgcctccgccaaggccatccataatctcggcgacgcggccaccggatcgatcgaggcccacgcgatggacgggcaacaacctcgccacgcgaagtcgcggccgtgctgaccggagcccggcatttgacataagagccctcataggccacctcaggaccaaggaaaccagagtctaaaacaccacgtttagttcctataaccctgaaatcctcatcctggcgatagtaggtatcgtcggtcagatcgctaatggttacgccgagttctttagcggcgagatacatcttcttcggtcgaatttctgatcccccgttgggccgttggcggcaccgggatctcggctgctggagggtggggccggccgccatgatgccgcgcgtcgactgccccatgtgcggcgcgtggtcgtcgcatcggtgccgggggcggagcccggcggccggttcacccgggctattcgaacgcggggctcgaggcgttcaacaacaggatcaaggtcaccatccgcatggcctacggcttccaccacgtcaccaacctcatcgccctggtcatgctccgatgcggcggactcgacatccggctgccacaacccgcaatctaacccacgaaaacagcagaagccttactttttctggggatgtgcattggtcaaattacgtcttctttcgtgatatgtcgagctttattgattgttgcgcagagcgccgtaatcgcaaaaacgaggcaggttccaatttcaatgacaaccgtccagcctttggcgtcgctgttggcaaagccgttggcggctatggagccgaggatgattgccgccacgattgcggtgacgtccgagcctcgcagcagtccaatcagcccgctgaggatgcttacgctggcggatagtatggcaacgccgagagcttcgaccatcatgcttgccaatgcggggagacgggaaccgtctccggtcaatagtgcgtagggaatcaggggcgccgacatgccggcccatgtggcgaggaacgtgccggaccagattatcgcgttttttaccaagaacaatggggctctgccgcagggccatgcataggtgattacgcggcccgtgccggagtaggccggaatgatgatacgggcgtagtgggcggttgaggcgatggagcagccggcggtggcgaccgcgcaggtcacggccaccgttaagtcggaaaccaggaaaccgagatgatcgactcgggcgatacccacgatcctgaagaacagcaacgacagcgagctgccgataagagtggcggccagtagaaacaggtagaacctatacgaggtgtattgtcgttcgatgcggtagacatccagcatgggacatgctccttggtcgtttgtgttagtcctgagtgtggcggaaatagtaggattccaggtcgttgatgtcgctcatggcatgttgcgctttgacggaaccgtgattgatgacgatgacctggtctccgatggtttcgagttgggcgagcatgtgcgcactgatgatggccgtgactcctcgtttgttctcttcccggatgatgcggcaaaacagcttcatacccgtggggtctaacccgttcatcggctcatccaggagcaggagcgtgggatgatgcgccagggccgttgccagtgcaaggcgcatgcggttgcccatggacaaggtatcggccggtaaatcccccatggaggccaagccgacccgttccattgtttcgtcgggggaccagtcgcatcgcatgaacgctagatgcttgtggaggatggcccgtacgctcatgcctcgctcgaagacgggaatgccgatcagcatgccgacctgtctcaatagcatgtcgcggttctcggggttcatgatacggccgcggatattagtttcaccttggtcgggggcgatcagaccacccaaggttttgagcagcgtggtcttaccggccccgttcgggccgatcagggcgatggtttctccgggatacgcgctgaatgatatgtcgttcaggaccggttttccgccgatagttttcgacaccctgttgcagtagagagtcgccgatagcgatttcatttcatctccttttggatgaccccgcaagacagcccacctccttatcgctttaggagggcaaactctgacagttccctgtctttgcttggctccccggactgttgatcccgttcatttgtacgggcattcgttagattacgaagggtttcgccatggaccaaggtctcatcctcgaaaatgaggattatctggcgcggtcaggctgtcgccacacccctttcaggggccgacgtagattctctgggcctgagataacaagggaatcggttgtcatcggagcgaaatcagactgctgtgtttccgggttgcatctgaggtcaacgtgtcttgcgtcacatctttcctgcgccaacttcagcgcatgcgtcgattcccggatgggaactgtgccgcgaaacctggaccgtatcttcagcatcgtggaggcaatcaccatggaggactatctccattgccactaagcggctatagtggagagacggcatgtgtcatatgcgtgtcagacttccgccgacccgtggaacgttcgttcccgtttgccacgtttagggggactcgtgaaacctttgccgacgctcctgatcatggacaacgaccggctggcattgcgattgctttcagccagtctcaaacgtctacttcccggctgcacggttcttgccccagtcgataccggcaccgaagccatatccatctgttcttcgcaccgctgcccggatcttctgctggccgatgtctccatgtccgacatcaacggattagtagtgtgccggacgatcagaaaagagaattggaagacatccgtactgatgatgacatcgttcagcgtcgccgaatatgccgctgaagcggtggcttcgggcgcccagggaatcatacataaggacaatccgaaaacaatcgccgaggctttgctgcagatcagggaaaggggagtctgttctgattgtttcctgaatgcccacgattcgtttttgcgactgaagtcggcaaagaacaaggatctgtcccctcgtgaaatggaaatcgttgatcgatggtcgcgagggagatcgatgtccgatatagcggaggagttatcgatcggtcagaccacggtgcgcacccatcttgaacatgccgcgtccaagctgggggtagcgaacaaccgtgcattgatttccgcttggatgcatcttaatcgttgatgaggatttccatgaatatggcgtttacgtttccgtcaaaaataattcgacactatgtggcacatccctgtttgtcccttctgtcgctgctggggctgtctcttgccctgatggagataatccaaatcggtcccatgcctcttctgccggcaatgctctatggagtgcttgcggtttcctttgtccttctccccgtcatcaacgaccaaacatgctgggccatcattgttgcaggttccgcgatctccatctccctcactcaggacagtcccttcgttgtcagcggcatgctcatcgctctcggcattcttgcgttctccggaaccgtgtctgaatggctgatcgcaatgctgatttgttcctgtacgtatatagcgagaagcgttatggtgggaaacttcaatgttttcgtttccgtgtcggtcacggtcatgttcttggccagcttgcttgccggcagattggtagcgcttcgccaacaggcttttatcagagaagagcaaaggttgaaattgcagcttcagcttcagcggcttgattatatgaagcagaagaatcgtcttgcaatacagatacatgattccttgaccaataatctttcggatatctcattaatggctcgaattcatatcgatgacaacatacccgacggcgatgattgggcaatcgttcttgaacatagccaagaggcgttcacgcaagtgcacgacatcatagacatcctttcctcggaagacaaggatgcgaaatcagaaacgacattcatggttgaactgcgtaatctgttggatgaaagatgcagccatcttcatgcgctgggttatgaaggggatgcgaccatcgagggattttgcattaaaactacgcaggaagaaaaggaagaagtgctatctctaataaaagagatatgcaacaacatacaacgtcatagcttgccgcacaatggctcgttcgagttgatcgtcaggctgtcaccctcgtcaatggaaattaacgagatgaatgatattacagccggatcgtcgctggctgcattcgaacaatcgggaaggggcctttcactgcactcaaaacgaatacaggaactgggaggcgaacttaactatagaagtgatgatggattgtgggtgctctacgccaaaattccgctgagtcatatggagaccacaaaaacttgaaaccaagtatagcgagaacttttaaaaaacaacaaataatctatcgtagattaatactccagtattacgaatacaacaatcaaaacgcggaaatatcattttattctatttccatcgcaggccgataattgctgagactgcagtgcctcctctatggacgtgggtggataggatactgtcgttgatcaatgacgaggggatatgccggctggtttcctcaccatcgtgcatcctctgatggccgagccccaatgaccacatcgtctgtcccatgaaaatgacgatgtcgctcttggcggattcgaccacatgagttgccgtgcccaacccgttaaacacctcagcagcaatcgaaaccttcgctctcgtccgttcacggcgttttttgcatggtgacgttccgatcactgtagcggtgagaataatcgcgcgtgcatagggaaaatcaccggaaacgatatcgtcgtagaacagttcctgcggcgcaaaacgatgtttaccggcatcccgggatttcgaggcggagcgcgcgtggctgatcggtggctaaccagaagaccgtgagtggtctcccgcatatcgcatggcgcgccgcgggcgacatcgctccgcagggtccggccggcccaaggccggaatgccgtcgctgttcgacggtctcacgtcgatcggcgtggacgagaccggccacgggaagggccacacgtgcatcaccgtggtcgtcgaccacgagcgaagccgaggcatctgggcgcgcgacgggcacggcaaggacgtgttcgacctgttcctccggcgattgacgccggagcggcgcgctcggcaaggtccacagacgcctgtggaaccagtcagctaacccacgaaaacagcagaagcctcaaaaagaaccgaaaacgaccgtttacggtcatagctggagcaccttttatattttgtttttcatggccgttccatccgatacctatgccaacgcggcgcggtccgcggccacgctatcattcgattaggcgaacggccacaggggaaaacaatgaattggtggcctttggccgctccgcacggtggaatccgctagctttgctgactcattcctctagcgaaagagactttgggaaacggccgtagcccttcgacgacagccaactgctcgatacgacgtggccgaagattgaggtcgataccgatacggttgatggtcctgggcttccgcagcggtatgatctgcccgccgaagcatgggggcgagtcaaggctaacaaccctgccacgctcggaggtcacaaagctgcacattatggcttggtcgggatacaccatgctgctatgccaagtatctggtcaccagggtggacaccaccccaataatgcccgcaacggccgaaataccatcgacataagaaaactatgagatctatcacaatcaactgttacatccgcaattatggtcacttggcgagtatcatgaaaccgtctgcaacgggggtaggcagtgattcagcgctatagtcaagggatgtcagcaagaagaatcttccccatattgctgattgcggaaggattatgcctatcgggcatgagcgtggatctgacaatcacctcactggccggttcatccctcgcgccagcaccatggatggcaacattcccgatagcgtgcatattcatcggtacggtgatcggcacaccggcaatgggacgcttggtggggcgattcggctatcggcaagtattcgtcttcggcgcccttctggccgtcttgggtggaatatcctcagccacggctttgcgattccaccagttcccattgctctgtatagggacgttctgtgtgggcatataccagtcggggacgaactactaccggtatgccgcggccgattccatgcccggcaaagaaagcaaggcaatcaacggaatcctatcagcaggagccatagcaagcatcatcggcccggttctggcgacattcttcggcactgcgaccagcatcgaatacgaggggtcatattacgtcgtcagcgtgctcgccgcctgcgcggtaatcgtgctgctggtgctcccgaaaattcagtcgccaactccctcgcatatgcgcgacaaagctatcgcgagcacaacccctaattatccggcattgctgacccgaccccggttcgtgctgggcgcgaccatcagcttcgtcgcatcattcgtcatggtgctcgtgatgagcggcgcgcccatagtcttggagagcacgttctcccaaaacgcgcaaaccagaatggtcgccatgcaactgcacatggtcggcatgtacctgccaaccctgttcgccatcttcattttccacaagaaaaacagcgaaatggcgcaggcgttgacggggttgatcgtcggcatgctcggcacagtcgtcgcactcgccgcgtcggcttcttatgccgttactctggatctgctgctgatcggaatatcctggtcgctgtgctacgccgcaggcagcgccctgttgacaaaatcctatgcggagtcggaacgttcgtgggcgcgaggcgtcggcgaactcgctcccgtattggggcaggtgctgggaagtgtgctcgctggcgtgctgctggccgcggggtggaaaaccgtattcgtcaccgtgctggcgatgatcgtatgcgcgctcatcgccatggcgggatatcgcaataaaatcaagtcataagcgcaaatgacatgtccttagacgacatagcctgttttgctgtagctggtattgctgtctatttagaagtgcaacgcccttgttcgttggttaattctagcggttcgtcggcgaatgcctcggccgcccgattcgcaaaccaattaattgtggtacaattaaatcatggcaattaggttcgacccgaaatccgcttacaagcatttcgaagaggaccgtctgagcgaagagcagatcaagcagtcgatgcgacaaccggtatggttcgcattaatcgaccctaatgacgtggaggttccgcctccggcagccgatgtgacatcacctgtggtgctcatgatctgcaaaaggcatcccggcgcgttggacgacgacctcatcgaattgctgataaccatggacggccgggacaagctcgtatttcatgcggagcgtctgaccgacaagtggcgcacgtactggctgaaatggcgataacgaaaggagaagcgcatgactgccaagaaatatctcgacgctctggccgatgaaaacggaccggctccctcgaacccgcccatcgcggctttctcagggaaagaggcggcggacttcgccgcgatgctgatggacgattccgttcctgcagccgacatgttcgcggccatgaagacggctggccgtcgcggtcgccccgccgcgcaagagaaacgggagaaaagcgtacaggaacggttccgcctccccgaatcatggagctcctacatcgaccacgccgccaagcgtgacggcttcgccaacaaaagcgactacctccgctcactggtcatggccgacgccgaagcacaccacgaagagcggcgactccaattggcctaatccatcacgacaaaaagagtgccacctgaatcaggcggcactctgttcagttggagacatcctgcgggcggcgcgctctcaccttgcgtgcgatgaaggtgagatccgaggacggcacaaagatgtagctttgggtcgtgaccgatgactcatgacccaacagctcctgcacggcacgaatgtcattcccggattcctcgtaggtgatgcgtccataccgtcggcggaatgaatgggtcggtcaaccagtcgtgcgcttgatgacccgataggcgtgatcgacgcagcagtgtccatcgaccttgcccggaaacaaccagccttcgccggccgtactccttatttcctgtgccaaatcattggagattggcacgatgcgggttttccctcccttgccgtgaaccagcaggtggtagatcgactctcccgcatgaaccgattcgatgacgtccggccctttgactttgctgatttcctctcgtctcagtcccgcctcggcgtccagtctgaccatcagccgtgccttgaggttttcagcccagacacctgcggcaacggcgctctccggtgcaggttgcttggtcggtttcttcggccgcttgatgggaggcagcgatgcgacaggattattcttcatcttatttgagcgtaccgcccatttgtaaaactcattgatgctcgctctcctcccggctttggcgcttgcatcgagatccgactcggtcaaccaggattgaacatcgacgggcgatacctgtcgcggcggttttgagcagacccgtgcaaaatcagtgacgcggtaccaataggattcgacggttcgttctgtcaaacaacgtgcctgcatatccagcacccactcgtctatgagtttcgtccatgatgcaggcggttgccgatgcgatgtgaacattgccatgtggcctccctttgttgcccaacaaaaccgggtcgcaggccgcgacccggtaagaccaagaaagatgaatcaactgggagatttatctagtcgtgttgcttggttgagcgggacagcattacgcggagacaaagggataaaagcattagacgcacgtacggggtggggttgatcgtcggctgtgaatcagcgtgtccagggttcgaatccctgcggggcacagacaaccggaatcgaaaggttccggttttttgttttccggcaaccggcaaccctatgggcgcgttggcgcggttcgtcgtggggcgaagtgtagaatcgccacgtttgctttcgcgcccagcgaacaatcgtcgccggctccgcggacgaatccccgatagcatgccgtgaacagtcagccatgcctgttgcgcggcgaagagaaaagaagaagcagtggattatcctctctttaccaagctggccgccgagttcttcggcaccgccattctgatgatcttcggcaacggttccgtggccaacgtcgagctcaagaacaccaagggccaccacgccggctggctgaacatcgccatgggctatggcttcggcgtcatgttcccggtgctcatgttcggtggcgtatccggcgctcatatcaacccggccatgaccatcgcccaggccgtcaacggcctgttcccgtggagcgacgtgctgccgtacatcgtcgctcagctgctcggcgccctgctcggccagttcatcgtctacctgacctactacccgcactacaaggagaccgaggacgccgacgccatcctcggcaccttctgcaccaccgacgcggacaaccagaaggtcaactacttcctcaacgagatgttcggcaccctggtgctcgtcttcggcgccctgtgctgcctgtccctagcttggggcaagcaggattacgccgccgcctccatcgtcgtcggcttcattgtgtggggcctcgtgacctccatgggtggcccgaccggccctggcctgaacccggcccgcgacctcatgccgcgtctgctgcacgccatcctgccaatcccgcacaagggctcctcccgctggggcgaggcttggatcccggttgtggccccgattgtcggtgccattatcggtgcttggctgtacgtgttcttcttcgccagctgattcgttgattgattcatgcatgcaaatggcctccgctcgttttgggcggaggccattgtcgttgaatcaggcaaacgcagagactactgctccaggaacacctgcggggccttcatgaagttcgtggcacagtgctcaccgcagaagtaataggacttgccctcatactcgcgcgtgatcgcatcggcgttcaccgccacggtcatgccgcacaccgggtcggtggcggtttcgccgcccgcgggggcgttgtggtgcatgtgcattcccatatccatagtgttctccttgttggttggattattggattggtcagatacgtgattggtgtgattcagcgtggtgcgatcgtcgatgatgacggtcggctcgtgaggcgcgttggatgtggtggagccggtggcgttggcggcattggctgattcggctgatccggctgattcgatacccgccgtgctgctgcccgagccagcggtgctatcggcagcacccacgttgatattcgccgcatgaagacgattggcgttcagcaccaggcacaccgagctcaacgccatcgccagtcccgcgatcatcgggctcaacagccatccggtgaacgggtaaagcacgccggcggcaatcggaatgccgatgatgttgtatccgaatgcccagccaagattctctcggatattgcgcatcgtggcattggacagattgatggtcctgatgacgccgcgcagatcgccgctcatcagcgtcacgtctgccgactgcatcgccacgtcggtgccggtgccgatggcgatgccgagatcggcctgtgccagcgccggggcgtcgttgatgccgtcacccaccatcgcgataagatcgtgcggcgcgcgggaggagccggacgtggctgtgttctcatcacgctcgcgctgcagtttggcgatccaataggccttgccatccggcttgacctcgcagatcaccgtatcgatgccgacctcacgggcgatgcgccctgccacttcggccttgtctcctgaaagcatcaccgtgcgtatgccgcgtgcacgcaatgctgcaatcgcttccggcgatccttccttaacggtgtcctgctcgtagctcggtttgttccaatcggcggtcgcatccaccacgccgcgcgtaatagtgccggtcttgtcgaagaccacagtgccgatgcgccgcgcctgttccagagcttttgcactggtgaccagcacgccgttggtggcgccgagccccagagacacagtgaccgagagcggggtggcaagacccagagcgcacgggcaggcgataatgagcacgctgactgcggtgatcagcgcgtgcgccagttgcggcgcagggccaagcgcaatccatatggcaaaggtccatatagcgatgaccatcactgctggcacgaaatacctggcgattctatcggccagctgctgcaccggagctttggttgcctgcgcgcgggccaccatcgccgcgatttgggagagcacagtattggcaccgacctgagtggcttgcatgacgaggtcacccttgagcaatacggttgctccggtgacggccgctccggtcgttttggtgacgggcttggattcgccggtaatcattgattcatcgatactcgcgttgccggccacgatgatgccgtctgtgggcacgcgctcgccgttcttgacgaccagcagatcgccgacggcaatcgtatcgatgtccatgtccgtgaaattcgcgggattgagccattccacgttctctggcgaagccgcgttcagcttatgcgcggtgcgaggccgtagcttgattagtgattgcaccgccttgccggtgccttcgcgggccttggtctccagcagtcgaccgaccagcaccagggtgatgaccacaccgaccgattcaaaatacggctcgcgtgaaccttccggaaatacctgaggggctacacaggtcaccagcgaatagagataggcggccgatgtgcccaacgagacgagcgaattcatgtcgggggagcggtgcgccagtgcggggaatccgaccgcgtggatcgggtggccgcagtagaacatcaccggtgtgatgagaatggccggcagccatggattcaccatccagtgcggcaccagcatcgaattggccatgtgcagcatggtgacgatgaacacggggagtgtcagcactgtgccgatggccactaatcgtgtcaacgatgtgatttccttcgtgcgttccgctgcctcacgtcgttctgcttctgcggagtccaacatcggggcttccgctgatgcagtgagcgggtacagtttgtccgtgcctgcgctggcatttccttcgaccttcagcaggccgtgcaccatattcatgccgcaggcaaatggatattcgccggcgggcaatgcgggcaattccacgtcggtcaccgcattgccgggcagcatggcatcgaggccgaggtcgccaaacaccacgtgagaggtgcattcaccggtctcctgccggtcgaatgtcagtgtgatcggtgtgcccgcgcgcatactcaccacggcaggggagtagccacctttgacggtgattgttgcggtctggcgcttgccggaggcgtccatggccccggatgcggccttctgttcgccgaaaaagaacctgagcaccagccatgtcaaggcggctgccgcaatcagcgccgcggcggtcgagaaaaggttgaactccatcaccgctccttcccatcagtattataccgagcaacagtgtataccctatacccctatggggtatataatggggtgtgctcagccgaaagatgagtatcaggaggcagcgatgcacgggtatgacgacgataaggccaaagtcattgcgcggctgcgccgcattgaggggcaggttcacgccattacgcagatggtggaggacgataaatactgcattgacgtgttgacgcagatttcggcatcgaattcggcgttgaagtcggtggccttgatattgctggacgatcatctgaatcactgtgtgcgccaggcggcggtgcagggcggtgaagttgccgatagcaagcttgaggaggcatccgcggccatcgcgcgcttggtgaggtcgtagttggtcgtgtgtttggctgttggccctggttgtctgtcgttatgcatgcggtgtgattgtcaatgctgacgttaggaaacaggaacatatctaccgccggttgaagatggtggaatactgggaaccatgtttgaacaaatgggaactgtgattgtggtcatcgccgtgctggtggtcggtgcggggcttgggctttgtgccggctttttattggggcggcataaaggtcaggctatggcgcgtgatgccagggcttcggagctggaggaggccaaaagcttgctggagtcgtcgcatggggaggttgccgatttgaccgctcgcaatgccgcttctcaagcgcagcttgaaggtgcgaaccagcaattgacgttcgtgaagtcacagcttgctcaggcgcagcatgcggaacagattcgcatcgagcgtgagcgtgagcgcgcggccgccgaggctgaacagaagcgtaaggccgatgccgaagccgccgaagtcaagcgtgtcgagcaggaggctcgtctgaaagagcagagtaaagtgctggaagcgcttgctcctgttgccaagaatctcgattcgctccagaccaaggtcacccaaatcgaagaaggccgcaagaaagagatgggggcgctcggggctcaactcaagggcctgaatgatcagcaggcccggttggacaaggaaacgagttcactatccgcggcactgcgcaacaataaggttcgtggtgcctggggcgaggcgcagctgaagaatattgtggagtccgcgggattgctggagcacgttgactttgacacccaagtggtggtgtccgatgccgacggtcgtatgctcaggccggatatggtggtgcatctgcccggtggcaagaccattccgattgatgccaaggtgccgtatgccgactatcagcgggcttgtgagattcccgagaccgcgggccccgaggagttggatcgtcgtaacgacctgttgcgatcccatgccaaggcgcttcgagaacacgtgcgtgcgttgggggagaaggcctattggaatgcgttccccgtcactcctgatttcgttatcgcctttattcccaatgaggcgttgttgcaggcggcgcttgaggccgatcccacgctgatggatgatgccttctcccgcaaggtggccttgacctcgccagtgaccctgtgggccgtgctgaaatcagtggcctatgcatggcagcagcaatcgctgacggatgatgccaagcagttgttcgatttgtctcgagagctgtatgagcgcttcgccgtgcttggcgactatgccaccaggctgggaacccaaatcaccaagacggtcagtgcctataacaagttcgcatccagtttggagcgacgtgtattgcccacggctcgcaaactgcaaaagctcgaacccaccaaggtgctcgaggaagtgcctcttatcgaatcagacaaaggcaatgtcagtgagttatccgcccccgaggtgacatcgtcggaggatgatgagccggtcaagctgactgcctcaggcgataggcttgaagcatgactgaatctggattccgcccgaccggcacctcggacctcaatgtttcacgcgacgcttccgcttttgccatgctggagccgcatgagcagctggccaccctgctgaaggagcacgtggttggccgcccgttttcggaacttgcctcggtgactttcgatcatcgtgccgccacggtgatgggtcatgtgctcattgacactcttgaagatgcaggctattcggttgacgattttgacgccgttggtgccttgactgcagctgccgtacccatggtgtctgccatgattcatgctgctgcttctcgtggtgaggatctggacggattcgtaatggacttcgtgtatccctcaatcaagggtccgtctattgaaggacggcgcgtgatgctgttggatgcatggctgtccgaaaaatcgtatgtgcagaccagttcgctggttaccctgcgtaatggcaatgaactcagcctcgacttcggcgtggtcgaacaactcggcgctcaggtcgtggctattacctcactggtcggcggtggagctaaagacatcaatgtcatcaacccctccactggcgaaagccacgtactgccattcgttcaggtctttgacgaatccgagctgaggtaattccattcgtggcttccccattcgggaggctgtcgggcgcaacgagctgtggtcggcgcacgacgttgataatctccgaggagcaactgtgcacgcacccaaccagatttccttggcggcaaaagcctcgggcgaaccggaattccgtgaagtcggtcttggcccatgggctgaaactcatcccggcgaacctcgtcctgatgacttggcatcgcctaattacgatgtccgtttcgattctgctctgctcgatgagggcgatcgccgcaatgtgctcgaccgatatcgctactggactgtgcaggccatcaaagaagatctcgatgcccacggccgccacgatttcgaagtggcggtggagaactggacccacgatttcaatatcggatccatggtgcgcactgccaatgcttttcaggccaagcgcgtgcatatcgtcggcccgcataagtggaatcgcaaaggcgcgctgatgactgagctctaccagcacgttgagcatcacccctcaatcgcggagttggtggaatgctggcataatcgtatcgctggtgaaatcgctaccgaacgggcgcgggctggggcggctgccttaaaggcccatgccatcgccagtgctcataatggggcggagactggtgccggcaatgggtcggagggcatcatcggtaattccggtgcaactgtgtcctcccatgtgtcggcgctgaatgctgtttcggcagttgccgaggccactgccgaaatcgcacaggcggatgcccgcatcaaggaactggaagccgctcgcatcattgctctggacatcattccgggcgcggtgcccatggagacctatgcattccccaagcgctgtctgctactgttcggcgccgaaggccccgggctgagcagtaaggccttggaactagccgacgacgtggtatacatctcccaatttggttcggtgcggtccattaacgctggcgccgcggcggccgtggccatgcatgcatggattgcccagcatgccgcaaccgcagtctgatggagcatagagaagcctcgctgccatcgcgattccgcgtattatctgtggtgttgcgtcacagcaatagtccgtgaaacattttgtgaaacatcaattccccatatttcctcctgtgaaacatcgcgtgaaacacaagccctggtagacgtgtgccaacagttctccccaatctgcccaatataggctaggatgaaagcatgattgaagttgaggagctgagcaaacgcttcaaaaccaagcaggcactagacggtgtgtcattcactgccgaagatggcaaggttacgggttttctgggaccgaatggcgcaggcaaatccaccactatgcgtgctgcgctcggactcatcagcccggataagggccgcgcgctaatcgatggcaaaccatatgtcaccttacgcgcaccaatgcgtgcggtcggtgcggtgcttgacgccaagtcagcgcataagtcgcgcactgcacgagcccatttacaggcccttgcctataccaacaacattcctaagcgtcgagtcgatgaggtcattgacatgaccggtctgcaagctgtggccaatgtcagagccggtcagttctcgctcggtatgagccagcgactgtccattgctgcggcattgctgggcaacccgcacaatctggtgttggacgagccaatcaacggtctcgatccagaaggcattaaatgggttcgcgacttatgtcgttactacgcagctgaaggacgagccgtgctgctgagctcgcacttgatgagcgaggtggcgttgaccgcggataatctggtgattatcgggcaaggccatgtgttagaaaccaccacggtgagtgcattcgtggccgagcattcctccagatccatccgtgtggtgacgccggaacccgacaagttgcgtgcgatttttaccagtagccctgaggtcaccgtggttcccgatactcgcaaatccgatgacccgcaagtaggcgaggtatttcgtgtcaatggcgccgacttggttgcggcggcacaggcgttcgcccgggccggcctgattacttacgaattcgtcgaagagcacgcctctttggaagagtcgtatatggcgctgacccacagcagcgccgaatacttggccaaggaggtcggatgatgagctccaataccatgagaacggccacggaaaacgccaatatgaccggcagtatgagtggtgcagctgctgaaaagcatatgcctgatgcgaccggacccagccaacctgccaacgcagaggcttccggccgtcctgcctctagccgtcgtgccagcagcacgtaccgtcgtgccaagctcactgtgttcggctcgctaaaagccgaattgctgaaactgtggtcactgaactccaccaaggtgctgttgggtattgcggtcgcgctcatgctggctatgtccgcgttgagcgcttggagtgtgaccttcatggcgtctacggatttgaacactggcaagacgctggacaatcccaagcccatatccgccgcagatctgtgggcggtactggcttcttccggctcgaccgcggcgctggtcatcggcattttcggcgtgatggccatcaccagcgaatacaccacatcagccgtgcaatccagtctgacggtcaaccccaggcgcggcatgttctatgccactaagtccgtggccacggccctgtttgcactggttgctggtattgtcggcattctgctggccgcaggtgtgctctggctattcactcgaggccatgacattacggcgctgaccagcgatcaaagtcgaatcattcctgtcacgttgatcggcttccctctgactattgtgctggtgtccctgatggcgcagggacttggcggcatgacccgttccacagtgggcggcgtatgcgcgctgatcgtgctcttcatggtgctctcgtcagtactgtccatcacatcgatggccattaaccaggtcgaatggcttggcactttgtcctatctgacaccggacaccgccatgaatcatttcctcggcgctggtatagaaagcagctcgcagtccacccttgccgcagccgttaaaccgaactactggattcccgattggtggcagtccggcctgatccttctcgcctgggccgccgcagcatgggctggcggactcatcgtcaccaaaaaagcggacatcaagtagctatgttctctgctgcaggattatcgccgcataaagcaatcacaccttcgtgcatcagacatattctgacgattgttatcgcatcaccattgttgcgtcgggaacgccggcggcccgtagtttattgatcattggatgctgcttcaacacatcctcataagtgaaccgaactatggagtcgactttggctcgatacagtccggtttcccgctctttttccgcgtgcaccgctccttgaatacccctgcggtcattcatattcggattggtgtatttctcgtacccgtcatattcgccgacgataagacggccgtcgggcagccgccagagataatctacccggtacagcgcgcccgtttgcgggtcggtgatgtcttgctgcaattcggggaccatgagtccgccttcaacgattgtgcctcgaccgagtgattcgccgccgttttcgcttgccgggttcgcataatgaagcaagcggaatatcggcgtgcaatcgcggtgcatagtgctgcaaatattgagaatgtccgcaatggcagtacctttacgtagtgccgaatcgatgattggcaacgcgaagcgaaaatcggtagacagcccgcagtccactactgtttgtgccccattggtcacagggattccattgacatattccggtgcacaatgtggtacgaatacacgtttgatattggcattgttcgcgttggtaccttgcgacgcggtggcgatggtaacggagccggcatgaagatgccatgggtgctcgaaaccatgcagtgccgctgcggtgactccggcgaaaacccagtttggatgcttgagatggagtgtgcatgccacatgctgtatgcgttcatcgggtttgagcgcattccagtattccggtttgacatacatgttgggaaatactcgcttgagctcgagttctttggctcggcgaataagggccgagcagtgtgattttgttcggccgtaaatacatatgcctgctgcttccgcttgcgcgataagcgcatccacttctttgtgatgtttcatgaatcgagagtatgccaatcgagaatgaagtgtccacttgttcgggcaatgtggtcgcagcttcgagcggattcgcatgtgaggattgcatagattggctatatctcgcggatgcttgcggattgaggcgtgaatcatcggcatgataattatgtatgtgcccccgttgcggcgtggaatgtggataactatttcgagtgcgttgatgcggtgcctggagaggctttcctgttcctcgcacttgccggattcggtttttggcgtttagaggggcaattggtgtttaaagaggggcaaacctgactagctcgcatttttgctccgctgagaagtcgtgagtagagcattttctcgattagatcgaggttttgctttgctgggggacagcagcgaggtgctttcatggtcagctcgtggttttacctcgctgagtgccagtaagcgtggtttttcttcggctttgtcgtggttttgccccgcttgggatgctgggcgaggtgtcttcattggttactcgtggttttgccccgctgaggggtgatgagtggggtggttgtgcggttggctggtaggtttgccccgttgggagctctcgaattggtggtggaacccgtgaagggctggcgcattgttccaatgggcgggaaaacgaggctttccgataactgcgtgtcacatacggctcatatagttaaggccatgccaacattttcacgcgaagaaatcgtgcatttgggcgacttggcccgaatcgcgctcaccgatgaggaaatcacccgtctgcagggcgaactgaacgtcatcgcagactccatcaacaaggttcaggaagtcgcctccgacgatgttccgcccaccgccaacccggttccgctggaagcctacctgcgcccggacgtcgccgaaaccccgctcacgcaggaagaggcgctcgccggtggtccgaagaccgaggccggtatgttcgtggcaccgcgaatcctgggaagcgaggagtaatcgatgagcaacgaaaccgcaacactcgtcaaactgtccgccactgagcaggctgctgccatcaagaagggtgatgtcacctcccacgagctcgtcgaagcccatctcaaggtgattgaggccgccgagccgtccatcaaggccttcctgaaggtctccggcgatgtggccctcgagcaggccgccgccttcgacgccaagtccgcagaagacaaggccgccctgcccgagctggccggcgtgccgatcgccatcaaggacatgatcgtcaccaagggcatcgagaccaccgccgcttccaagattctcgaaggctgggtgccgccgtacgacgccactgtcatcgaaaagctcaaggccgccggcatgccaattctcggcaagaccaaccttgacgaattcgcacagggctcctccaccgagcactccgcctaccagaccacccacaacccgtgggataccgagcgcgtgcccggcggctccggcggtggctccgcttccgcagtcgccgcattcgaggccccgctggctctcggcaccgacaccggtggttcgattcgtcagcccggcgctctgaccggcaccgtgggcgtcaagcccacctacggcggcgtctcccgttacggcgccatcgccatggcctcctcgctcgaccagatcggcccggtctcccgcaccgtgctcgactccgccctgctgcaggagattatcggtggccacgacaagcgtgattccacctccattcccgaaggcccgcgcccgatggtcgccgccgcccgcgaaggcgccaagcgtgacctcaagggcatgaaggtcggcctcatcaaggaactcggtggcgacggcttccagcccggcgtcgaggcccgcttcaacgaggccgtcgacaagctcaaggacatgggcgccgaggtcgttgaggtctcctgcccgcacatcggctactcgctgggtgcctactacatcatcatgccgtccgaggtcagctccaacctggcccgctacgacggcatgcgctacggcctgcgcgtcatgccgccgaccggcgtgccgcaaaccgccgccaacatgatggcctacacccgtgaagccggcttcggcgacgaggtcaagcgccgtatcatcctcggcacctacgccctgtccgccggctactacgacgcctggtacggctcggctcagaaggttcgtacgctgatcatcgaagacttcaagaaggctttcgagaaggccgacgtactcgtggctcccaccagcccgtccaccgccttcaagttcggcgagaagatggacgacccgctggccatgtacatgaacgacatcgccaccatcccggccaaccttgccggtgtgccagccatgtccatcccggctggcctgtccgacgacggcctgcccgtcggcttccagttcatcgccccgcagcagcgcgacgaagtcatgtacaagccggccgcagcccttgaggcggcgctggaagacagctggaacggcccgatctggaacgacctcaagaccccgtggcttgacggtctgagcaagtgagcatcggaaggaaagaaacaacatcatggctgaaaaactgatgaagtacgccgatgccaccaagaagtacgatgtggtcttcggtctggaaacccacgtggagctgtccacgaacaccaagctgttctgcccggcccacatcgagttcggcggcgagccgaacaccgagttgaccccggtgagcctcggtctgccgggaagcctgccggtgatcaacaagaccgccgtcgattacgccatcaagctgggccttgccctgcactgcgaaatcgccgagtggagccagttcgcccgtaagaactacttctacccggatatgccgcgtgactaccagatctcgcagtacgacaagcccaccaacggcaacggctatctggacgttgagctggaagacggcaccgtgttccgtgtgccgatcgagcgcgcccacatcgaggacgacgccggcaagaacacccacgtgggtggcgccgacggccgtatcgagggtgccgaccactcgctggtcgattacaaccgcgctggtgtgccgctgatcgagatcgtgaccaagccgatcgagggtgcgggcgaccgcgctcccgaaatcgctggtgcttatgttcgcgctatccgcgacatcgtgcgcgcgctgaacatctcccacgcccgcatggaacagggcaacatgcgcgccgacgtgaacgtttcgctgcgcccgagcgccgatgccccgtacggcatccgttccgaaaccaagaacgtgaactcgttccgtggcatcgagaagaccattcagtacgagattcgccgtcaggccgcgcgcctcgacgaaggcaaggagattctgcaggagacccgccactgggatgaggctacgcagaccaccgctggcggccgtctgaagtctgatgccgacgactaccgttacttcccggaccccgacctcgtcatgctccacatcaccaaggagcacatcgaggagatgaaggcccagatgccggaaatgccgcgcgagcgccgcaaccgcctcaagtccgagtggggcctgagcggcctgcagatgcgcgacatcctcaacgccgacgccctcgacctgatcgaggaaaccgtcaaggccggtgccaaggctgccggtgcccgcaagtggtggctgggcgagctctcccgcgaagccaacgccaagggtgtgtccctcgaagagctgccgattaccccggccgatgtggccgaggtcgagaagctcatcgcctccggcaagctcaacgacaagctcgccaagcagaccgtcgaaggcgtgcttaagggcgaaggcactccggatgaagtcgtcaagaagcacgactacaagatcgtcgaagacaacggtgccatcgagacggccgtcgacgcggcgttcgaggcgaacccggacgtggtcgagaagctcaagagcggcaacatgaagccgatgggcgtgatcatcggcgccgtgatgaaagccacgcgtggccaggccgatgccaaggccgtcaccaaggtcgtcatgagcaagatcaagggctgattagattcactggctcccctctttgaggggagcctttattccttttgtaaggaaacgaccccactcacttccagcgttcacccagtcaagtaagatatgttcggcactgaattgcgagccgaaacaggggacatatgctaatgactgaaaccaacgagatgctgagcgtggctactgacgcgcaacttacgcgcgatctgccgcatagcatcgtcattccaccgattaccggtgaaatggtgcatctgcgccccgctaccgttgaagacctgctccggttggatgaactcgacgctttctatggcgcgtccaaaatcaccggtaaagatgcggccaccgaacgtgccgtcgtgcacacatgggttcgtcgttctcaggcttgggaagccggacaggctcccgcggaatcaggcgtgggcgatccggaatctcgccgcaccatcgcatgggccgtgcttaccgacgccgaccatgacgatgacggcatgatcgatgccgctcccaccgacaacgttatcggcatgattttcctcatcgatatcgatggctggtcccgttccgcccgtatccagatcattctgggcaaggactaccgcggccgcggctattcccgcgatgccatgccgcgtgtgatgacctacggctttgccccggagccggccggcttgggcatgcaccgtatctgggtgagcgttccggaaacgaacactcgctcgatttccgtctaccagtcgcttggtttcgtgccgtcgggcacatcgcgcgatgccctgtgggatgtggaaaacaataagtatcaggatcttattgttatggatacgttggtggatgaatacgatccgattcgctccctggatgctttcggcatgcacttgattgaggacaatcccggcgtcaaggaagcgctgtctgcgcgtgaacactccatggcgattcagcagcgtgttgccgagcccggagcaggagagcagtccacggctgccgacgagtccgagacatcgtctgaaatcgccgaagcacctgcccaaccgcagagcaccagcgagcaggccaccacgggaacgcatactcgttccacggatgaagagagcaattggccatatggtcaggccgaccgcaaatcttccaaggaagcttggtggcgtacactgggtcgcggacgcaagcgagatacggaaggtgaataatcgagcatgagcgccgaggatctggataattacgaaactgacgccgaactcgcgttgtaccgggaataccgcgatgtcatcaagctgttcacgtacgtcgtggagaccgagcgccgtttctatctagcgaacaaagtggatttcaatgttcgttccgcaggccaggacgtctacttcgacgtgcagctgactgatgcatgggtatgggatgtgtaccgttccagccgtttcgtcaagtcggtgcgtatcgtgacgttcaaggatgtcaatgtcgaggaagtacagaaaaccgacatcgacattcctgacgatattcattaaaggtgtatctgccctcgccaagataacaagaggcggcagcacaaagaacttgtttgcatcgcccgcgcgcatcgcggtctatgcaatattcgcaaggaaatacacagtttgaacgtgcgtttccgaggcttacgataaactatcgctgatttggttataaggagatgcaagtgagcgaaaagcaatctgtggtgattatcggtggtggtcctgccggtttgaccgccgcatgggaattgattaaggacggcggcgctgataaatacgatgtgactgtgcttgagggaacccgtgcattcggcggtatctcgcgtaccgtgaagcacaacggcaaccgcatggatatcggcggtcaccgcttcttctcaaaggacgagcgcatcatggattggtggaagacagttctgccgctgcagggcgcgccttcctatgatgacaagaagctcggccgtgagcacgatatggagtcgggcggccccgatcccgaggtggaagacaaggtgatgctaaagcgtcaccgtgtgtcccgtattttctggaaccgtcacttcttcgactacccgatttccctgagccccaacacgctgaaggctatgggcttcaagctcaccatggtggccggcttcagctacttgaaatccatgttccacaagttgcccgaagacaatctggagaacttctacatcaaccgctttggccgcaagctgtactcgatgttcttcgagggatacacggagaagctgtggggacgtcacccctcccagatttccgctgactggggtgcccagcgcgtcaagggtctgagcatcatgggtgtgctcaagaacgccttccagaagctactgcccaagcagcgctccaacgccgaggtcgagacctcgcttatcgaggaattctggtacccgaagtatggccccggccagctgtgggagactgtggaatccaactgtgagaacgccggcgtcaaggtgctgaccgacgccacggtggtcgaactgcgtcagaacaacggctccatctcctcggtggtgtatgaggactccgaaggtaaccgcaccgagcttgccgccgatcagttcatctcgtcgatgccggtcaaggacttggtcaacgccatcgatgcagccggttccgatccggaaagccccgaatccaagggcgctcctgccgacatgaccaaggtggccaacggcctgccgtaccgcgacttcgtgaccgtgggtcttctggtcaagcacctgaagctcaagaacaccacgaacattcccaccctcggcaacccgccgattgtgccggactgctggatttatgttcaggatccgggctacaaggtcggccgtctccagatcttcaacaactggagcccgtacctggtcaaggacgtgaacgacaccgtgtgggttggtctggagtacttctgcgaagagggtgattccttctggaacatgagtgaggaagacgccaccaagttcgccatttccgagctcacccgcatgcgcgtgatcaatggcccggatgaggtcctcgactcccaccgtgaacgcgtgaagaaggcctaccctgcatacttcgatacctacgagcacatggacgagctcatcgaatacctcgatggcttcggcaacctgtactgcgtggggcgtaacggtcagcaccgttacaacaacatggaccactccatggccaccgccattgaggccgtcggcaacatcaagaccggcaagacgtccaagaagaatgtgtggtcggtcaacaccgacaagtcctaccacgaagaaaagtaatcagcggagcgtatgccgcctttcttcaccctcgacgcacctcagtgcgccttcggggtcagacggcggcctccgcacgcgctgattacttttcttccctcgcagattttgcattctcggctcccctctctgaggggagctggctcgcgaggcgagattgaggggagccaaccccagcaattacatacggcctgccgatactcggcgggccgttttgcattggtcgtgctcgcgttgtagagtgaacaacgttcgcgagaacatcagagacgtagcgaacattcatgagcggtacagccgcagaatcactcttaacgccgtaacaggcatgggcctgttcggtatggaaagggcaaccagtggcaaatagccagaatcttgaggatatgaagctgcctgagctcaaggagctcgccaagcaaatgggtctacgaggcacgtctaccatgcgcaagcccgaactgctcgccaccttgcaggccgcccgcagtggcggtgagccgccggctggcgtcactgtgtgcactcccaaggccgacaaggccgtcaccaaggcagccaaggctgagccggtcgtcgaagagaccgttgctctggcggaaccgcagcttgatctatccgcacttgccgaagagcccaaggccgcggagccccgtcgtgtgcgccgtaaggcagccgatgaggccactgaagaaccgcgcgatgcccgtcatcgccgcgatgatgaacgaaccggccgcaagccgcgcaagcaggccgatgaggccggcgatctgctcgcctccctcgatttgggcgagacaaccgctcccgagcgccgccgcaaccgtcgtgatgacaccgaagctccgctcattcgccgtgtgcatgatgaggatcagccgcgtcgccgtcgccgtcctgcggacagcagcgacgagaccgtgcgcgatttggatgacattctggccacgctgcccacgcagaagcacgacgaaccttctgacgatggtgaacagagcgaagaccgcgagttcagccgtcgcagccgtaaccgtgaccgagatcgcgacaaccgcaatgatcgcaatgaccgccgcaaccgccgtatgcgtggtcgtgaccgtggcgaaaacgccggcgaggacgatcgtcgtttcgatgatcgcgagaaccgcaatgagcgccgcgaggagccgcaggaagacctggtaccggtggccggtatcgtcgatgtgctcgattcctatgcgttcgtgcgtacgtccggctatctgcctggcccgaacgacgtgtacgtctccatgggccaggtcaagaagtatggcctgcgcaagggcgatgccgtgcacggttccattcgagccccgcgcgagaacgatcgccgcaaccagcgtcagaagttcgtgccgctgcagtccattgactcgattaacggccagagcgtcgaggacgcactgaaccgtccgcagttctccaaactcaccccgctctacccgcaggagcgcctcaagcaggagaccgcgccgaacaagctcactggccgcatcatggatatcgtttccccgatcggcaagggccagcgtggtctgatcgtctccccgcctaaggccggtaaaaccatcaccctgcagaacatcgccaatgccattgccgccaacaaccccgaggttcacctgatggtggtgctcgtggacgagcgacctgaagaggtcaccgatatggagcgcacggttcagggtgaggtcatctcctccactttcgatcgtcctgcttccgaccacaccaccgttgctgagctggccatcgagcgcgccaagcgtcttgtggagctcggccaggatgtcgtagtgctgctcgattccatgacccgtctggcccgtgcctacaacatcgcggctccggcttccggtcgtatcctgtccggtggtgtggatgcccaggcgctctacccgccgaagaagttctttggtgcggcccgcaacatcgaaaacggcggctccctgaccatcatctcctcggcgctggtggaaaccggctccaagatggacgaggtgattttcgaggagttcaagggtaccggcaacatggagcttcgcctctcccgagagctggcggacaagcgcttgttcccggccatcgacatcaacgcctccggcacccgccgcgaagaactcatcaccgacccgcaggagctgccgattatctatcgtctgcgccgactgctgggtggcatggagcctgagcaggcctaccagaccctggtgccgcgtctcaagaagaccgccacgaaccgcgacttcctagccgctatcgtgcagcaggccaacaccggcaacgcggtcaacggcaactgattaggctgctagaatctgacgtaaagggctgtctccattaatgcggagacagcccttttgcatagcgcatgcgtcatccatcacattgcagctgtaatattgccgcagtgcttcttcgcataacgaagttatatgacacggggaggaacatcatgagctctatcgttctgggaatgggcaacggcgcagtcatgtttggtgatcgtgatgccagcaatgtgcccgatgatgatctcatttagccggtgaatcctgctgctgttaatatcagtgcctttgatttaagcgtactgcgcggcgatggtattttcgaggccaccaccgtgttcaagggcttcccgatttcgttggaaaaccacctgcgccgattgtcggattccgcccggctgatggatttgcctactcccaatattgcagccattacgcgcggtattgagaaggtgatgtctgcctatgatgatcctgaaccggcaccattactgcgtattatcgtttcgcgcggtctcgatcaggaaaccggaatcggcaaagctgctgcggcgtctggcaacactgtgccgactattttcatttgagccttctgttgttttcgtgggttagagggtgggtgttggtaggtgggtgggtaggccgctgcatcggagtttgatcatggcgatgaggttgtcgatgtgtcggaagccgtaggccatgcggatggtggccttgatcttgttgttgaacgcttccagacgcgcgttggagtagccgggtccgatggttccgaggatgtcgtccctgcgtctgcggatcttcctgcatagttcgacgatctcggggatgcggctgtgggaagcccggaagatccatcgtttcaattcggcttcggcttgtccgacgggttggcgcgggagcgtcctgaggagttccttcaactgccatgaccggtagagctggcccttgggatccgtgtccccgagcgtctccaagctccggattgccgttcggtcaggtcgccggggttcttggggcacggcgtatttcaggcctttcatcgtctccgtggctgtcttgtcgttgccgcgtctggcttggttccacaaccgtttcctgacctggtcgagcgtgtcggtcatccaggagacgatgtggaacgagtcgagcacgcgctcggcgttcggcaggtgctccttcacgctggcgtcgatccatttggcgccgtcgccggtggccgccttgatggaggcgcgctgctcgtcggtcagttgtcggaagaacaggtcgaggacctccttgccgtatccgtcgtgcgcccgcacgacccgtttgcgcttgtggtcgacgaccacggtgatgtacgtgcgccccttcctgtagctggtctcgtccacgcctatcgcggtgagaccgtcgaacatgcacggcatcgaggatcccaagcgggcggcgaccctgcgcgcgatgtcaccggcggtcctccacgcgatgcgtaggaatccgcccacggtcttccggctggcgaccgccgtcagccacgcgcgctccatctcgaaatccctggtgaaccggctgcccggctccgcccacggcacttgggcgaccgccaccccatgctccgcgcacgccacgcgcggcgccatgggctcgaccccatagcggccgaagtcctggtggcgccatcgccgttcgccgcccccgtcgtcgtacttggggcacttgcgcccgcaacgcgagcaacgcaacgcgcccttcctgcgccgcacccggaccaccaggacgggagccgggcgcagcggcgagtcgtcgatggacacgtcttcgacgaccatgcccttgacgttcagcaatcgtttgaataagcccttcaaccaaggcgctttcctcggttgtatttcctggtcgaaaaacaaacctgcaggaagcgcccctcacacattgggattcaacggctcaccgacgaaccaccacccacgaaaacaacacaagagcctcaaaataaggacagccgccggaaccgatggcgtcagtcaaatgtggggtcaccgcccaagccgtcatccaccattatcgccgatcagaaaccggcataaccattatcaacgtcaaatcgacacgccgacccaatcacatccattggaccggtgcataatcgtgaatagccgagtaaccaccgccccacataagcaccggccaatggttttgcggcactgaactcgtacgtgatatacaagtccaccgcccgatcacgctacaccctggaatccttcacgatgacactcgccctggcccaataagtccaagggaacatccaccccgaatacgtttgcacccattcgatttaggcatcagtgagtatcgttgaatcgtatgatggataattcgcagactgtgccgaagttgacgttgcagcgtcgcatcgagagcatggatctggtgttcatggccgctggacggcaggagtgcaagccgtcggattcgagcggcccgaggacatgctcctatcacatgctgcatttcgtgctcaaaggcaaggtgcatttctatcttggtgggcagcattacatcgtcaatgctgggcaatgtttctacgtgcccgagggaaccaatacgttctattattccgatcccaccaatccatgcatatacgcgtggatgaacttcaccggcgatgatacggtggagatagtccgggaatgcggcatgtccaatgtgtgtcccgtgatcgccttgccggatgtgaagcctatctgggatttcattggcggactattgcattgctataatccgacgcccgccaacgatatagcgatccgcgggttcatgcatttgatctttgcgacgctgatgcgtaaccccaacgtttcgagcatcgcgcaggaagccagggattcatcgtccgagaatgatttgatcaagcgtgcagtcgcctatgtgcaggaacacgcggacgagactctgagcgtacagatgatcgcggacgcattgtgcattagccgcgggtacctgcaccagttgtttattaagtatctgcatacgactccgcaacagttcgtcatcaattcgaaggttcagaaggcgtcggaattgttgatcaaaaccagaatgccgatcgcgcggatcgccgagctgtgcggatatcgcaatcagttctcgttctcaagggcgttcgcgcgcgaactgacgctcagcccgagcgaataccgtcggcgcttcagcaatccggaccgtctcgtcacggaataaccattccgacgctgtattgcagtttgtaagattttgagaatcctttggatatctttttgtatgtccgaaaatgttcggttcctcaatttgtcggctatatattgcagtttgttcactagataggccttgagcagcatcatcggatgtcatcttgcatataatcttagtacgtcattcgagaagtgatcagaaggacgtaatcagaaggaacggaagcccgcaaattcaaggttgaaatgcggattaatgtaaggattcaacatgcgcaaaaccatcggtaaggcaatggccgcaacgacatctttggcattggcattgtctatggcggcctgcgggtcgtcgagcgagaacgcggaggaagcgacaaaggtcggtggcaccatcaccatctggacgtgggagcagccgggcaaagcgttcgaagccgccgcgaagggattcgaggaagccaatcccggtacgacggtgaaggtcgagaacgtcggtaaccccgccatctgggacaagatcaccacagggctcgctgctggcggccagggtctgcccgacatcatgaacgtgggcatcgactacatcggcggctacatggacaagttccccgacgcgtttgccgacctgtccgattatggcgcggatgacctcaaggacgatttcccgtccggtgtgatgaagagcgccacacgtgacggaaagatctacgggctccccttcgaagtgaacaccggagcgctggtctacgacgtgaagatgttcgaagaggccggcatcaccgaggacgacatctccacatgggacggtttcatcgaatccgggaagaagctcaaggaaaagaccggcaactacatgttcggcatcaacaaggcatgcaccggcaacgcgaactgcggcgacacttggcagattatcactgcattgcagaactccttctacttcgacaccgacggcaacatcaccatgaacggcgaggccggcgtcaaggccatggaactgatcaaggaggcgaacgacgcgggcatcatcatcgagctgcccggaacatcggacgactcctcgtggcaggtgcagcaaggcaacgtcgccacactagtcgaccgctcctacctgcccggcgtgctcaagaccaagttccccgacgctaagaaccgttggaaggtgaccgctctgcccgcagtcgaggagggaggcctgcgctccgtggtgcccggcgcgacctacctgtccgtcgccaacgcgagcaagaacaagaagaccgcctgggagttcatcaagtacgcgctcggcaccacggaaggccaaaaggccatgtatgaatcccagggcctgttccccggctatcttccgttcatcaaggaggatctgaacacccccgacgagttcttcaacaatgagaacgtcaacgaggtgttcatcaagcagctcgaggacgagacccccgagctcaacttcaccggagactacgcgaaggcgctgaaagccatgattgatgcccaagtccaggtgctcaccaagggcgccgacccgcagaaggccttggacgaggctgcggaacgtctcgccaacgagacaggccgcaagatcgcctgaccttatcagaattcgcatggggtcgttggaacctctccaccccgacggccccatgtctttaacaattaacggtactccgacgaagggaaaggagcgacaatggtgacgcgggccaacacatcatcaagaaaacacttcctgacacaacgaaacgcgccgtacatcttcttgctgccaatggtgctgctatacggcgtgttcaagatttgtccatatctatattccgcctggctgagcttcacgaccaaccagtccggcaaacaattgttcgctggattcgacaactacacgcgcctgttcaaggaccaattgttctggaaggcgctgggcaacaccgcgatcatcctggtgatccaggtgccgctgatgctgtttctggcgatcctattggccgtcgcgttcaactccgcattcctcaaactgcgttccgttttccgcatgggttacttcctgcccatcgtcatgggtttggtcgcatacggaatcctgttcaagaacatgctcgacgccaacagcggagtggtcaactatctgcttgagctgatccatttgaagcccgtcccgtggctcacggattcgacatgggcgaagatttccatcatcatggccatgacctggcattacactggtcagaacgccatcatctacctggcccaattgcaatccattcccactgaactctacgaggccgcatcggtcgatggcgcgaatggatggtggaagttccgctccgtgaccttgtctggcttgaggccagcaatcctgttgaccaccgtgctcagcaccatcggcacattgcaattgttcgacgaaccctacgtgctcaccaacggcggtcccgacaacgcgacattgactgtcggcatgtacctgtacatgcagggtttcaagtatttcgatttcggatacgcgtcggcaatcggctatgtgatgctcatcatcatcgtcggtctgagcgtcatccaattctggatccaaagggagaagtgacatggccacgccaaatctcaaagtagacaagtcccagaggatcgatgcgaagcggaacggctggcgcaccgtcggactgaccgccatcctcgggatcggactcatcgtcttcgtgttcccgttctactggctgctcgtggcgagcaccagaaaatccacggacgtgttctcgaagacaccccacatgatccctggcaccgaactgttcaacaacatccgcaacctgatgaccaacacccagttcggcgacgccatcgtcaactcgctcatcgtgtcggtcacctacgtgatcgtcggcggcgtgatctgttccctagccgggtacgcgttcgcccaataccgcttccgcggccgtaacatcctgttcgcactggtcatcggtgtcatggcattgccatcgcaggtcacgctggtcccgttgttcaagatgatgttgtcgttcggctggctgggaacttaccaggcgctgatcttgcccgatctggcgttgccgtttggggtgttcctcatgagacaggccatgtccacgttccccacgtcgatcgtcgaggctgcgcgcatcgacggcgctggtgagatgaggatcttcggcacaatcgtcctgccgaccatgaagcccacgctcgccgcattggcgatcttcatgttcctcggacgttggaatgacttcgtgtacccgttggtgatcaccaggacgccggaacagtacacgcttcccgtcgcccttgccacattgcagggtgcgaacaccacggattacggccagttgctcgccggcacgacgatctcgatcctaccggtcctgatcctcttcctgttcctccaaaaggaattcgtgtctggcatgacggcgggatctgtcaaggagtgacatgctcaggtgccaaagaaggcactggaaaggacggctcatatgcttttggatcatttcaaggacatgctgcatgaggggcaaagcctcggcgcgacgtggatcatgcattcggacgggctgaccatcgagacgacgtgtgaagatggtccggcatcgaagggcatcgtgttcgatgtgacggcggcgaatccgggggccactgcgacgattgtgatcggcaagcctctcggctccatccagaggtttcacatggtcggatcccgttgccgcgagccgttgcctgctgactgggccggcgtcacgcaggtgtcgttggtcaattcggcccccatgggatgcatggtcgacgatgcggacaggaacgtgctgtcattcgcatattcgttcgcacaggacgagattacgatgcgttacggcgtcgacgaggaacacgtgttgttcgtcgtgatgctgcagatccaacgtgttcccggacatagccgactgttactcatggatgacggactgccgttggatgagacgatgcggctcttggtcgaatgggtggccgatggttccgcacctttacccatggcggacaaggcgctggaaccggttttttccacctggtatgcgtacctgcagaacgtcgacgccgagaccttgggacgtgagctcgacggcatgagccgactgggatgtggatccatattcatcgacgacggctggcagcaatatggcagcgggcgcggatattccggttgcggcgactgggttcccgatcccgttaaattccccgacatgcgtgccactgtcaggaggttccaggacgcgggggtcggcgtcgtcctatggatcgcacccctgttgctgggcgagaaggcgcacgtgttcaagacgttggaacgatacgcgcccatccatgacgacgggctgggacggcaattccacatcctcgacccacgacgcaaggcggtccgcgactacatcggcggcgtttgcgctcggatggccaaggattacggcatcgccggactgaagatcgatttcctggaacaggccggggcctaccaaggccagccattggagaatcccgaacccggcgacgtcaccgatgtcggcgaggcgatgagacttatgctcgaacggatcaagaccatgttgatcgaaaactgcggtcaggtcccggtcgtcgaattccgccaaccctattccagtcccgtcatcgcaccgtacagcaacatagtcagggccagcgactgtcccgccgatgccctgaccaatcgaatccgcaccatcgacgaacggctggccgctggtaaccgcgtggtgcacggagatatgctgctgtgggacgtgaacgcgggagcggagacgtgcgcggcgcagattctcgcatcattcttcgccgtgccgcagatctcggtcccgccgtcggccatgtcgaatggtcagtatgaatcctgccgtttcctactgtccctatggcgcaaacaccgaaacgtcctgttgaatggccgtctgcagccagtgtcaagcattctgggctatccactcgtgcacgcgttcgacggcaacgggacgcaagtcagcggcgtgtacgcgccggacatgatcatcgacgtggacgcggatacgagaacgctgatcatcctcaacgcatccacggaaaacaacgtgaccattcgcctgcgcggtgacggcgggacggtcaagttgaccggccacgcatacgactgcacaggagccatcactatgcagtttgaagaagatacagatacgttccgtgaaaacggagacgcgacgatcacgacgattccagttcccacctatggcatattggaattggcgctagagcgataaaacgcgatacttttctgaaccacggttgttggactggagaaattcagattcgatgatcggaggtgtggttctttcgtatgggtgaagatcggaggagacattacgacgacgggttccggcgcgaggcgctggaacccgtcagggccgggacgggcagcaggacgttggcgcgccggcttgcgatgccacggcagaccccgaaacaatggatcctgttgtatggatccaacggcgaggaggcagtcatgggagccaccggcaacaggcgctatgactggtagacgaaggtcgcggccgcgcgcgaccacgtcgaggacggcctgaccgtagccgacgtcatggtcaaatacgggattgcgagtatcgcacaaggactcgaacgggagtattctcgatatcatgagagaaacgagcagcgactggcaaaagaccaccattgattccgcccaagcggcggctcacccggaaaccgcgcaggcggtggcgcgtatcaaggcgctgcggcagaccatcgataacatcgattcagcggccatagccctgctggccgagcgtttcaaagccacctcgcaggttggtgtgctcaaagccaatgccggattcgcccctgaagataccaagcgtgaggattatcagatcgagcgtctccaccgcatcgccatcgatgccgggctcgaccccgaaatcgccgaaatgtaccgtgaattcgtggtcaccgaggccaagaagcggcacaagcgtattgccgacgccgggggagacccgggcgtgctcgacgtattcgcctgagcttctcgtagcaatccattactggtcagcggcacacgaattgcccatgtccttccaagggcaatggcgactacattgatacgggactatcgataccgatagccaaaaccgtataaccattgaccacattgaacggaaacgccgccatgagacttgcctccgccttgatcagttgcgtactatgcgtaaccggcactgttggcggtgcgtggctttcccgtccggcatcagtcgattatggctctctgctttccaaagcaagcgacatctatgccgtcaccgatgagaggggagacgcaacccggctgtatgtggtgaacaatgccagcaatgcggcaatctcccgcattccgggcgcggctgccgaattgccgtggaaagtcaacgtcacgtattcgctggatggtccgaacgttgaggccagcgagatttccggagcgtctggacttgtcggcatatacatcgatgtcaaaccgcagtccagtgcagccaaccatacgattccggttgtcaccttcaccgtgcccgctcaagtgactggtgatatttccgccgataatacggcttcggtagccacgcagggctccgatattgtggtagccgcggcagggaacgtttcttccgggctgaaattcagctgctacatggacgcgaagaagttctcaatgggtgccgtgacgctcgccgcgctgccgtcttccggagagccgtccgttggagccgatcctcaggccgcaggatccgccactcagtccgaggccgatgccggcgaccaaaccgctgccgatacagatgcttcccagctgattgccaacagcgctactttggttggttccctgacggatgcgggctccggcgagcaccagcagcttatcgatcagctggatgcgctgcgcagcaacgaacgtgcgctcgacaagtccgtggtggccgagcgtaaagtaacccacaagcaggcttttgatgcgtatatggctgcatatgttggcgcctataccgatcacttgtctgggtccattggtgattccagccagctgtccgcgcttatgggaacagccggagagctttccaaaaatacgccattagcccaagcggtgattgatctggccgatgcagtgaacaatgtgagcgccgcgcaccagcatgcgggtgcagtcgaagcattggacgaagtgattcggcgcatccaacagcagggaaccactggtttggcggatgatttgaacaccgaagccgccgaagaggccaccaagggatccaagcagtatgccgaggggcagagccaattgtctgctgcgatgatcccgtattcgatgaaatacacggacgtatacacggccaatctcagcgcgttgaccggcggcacctcgtctggtgccgggattcacgagcagcaggcaatcgccgaaaccaatagcagcgacgatttgactgaggcgcagtccaaggtcgatgctgccatgagcacactcgccacggcatccgagcacaccggtaaggctgcggcattgcgtcagattgtgcttcgtttttcagaccagttcgccagttccggcaatgtgcagaatgcgtcgagcggttctggctcggttgatcaggcccatgcactggccggcttggcggacgcgcaatcgcagtcgttctatggcaagactcgtgccgcggaagccaagcgcaaggccagtgctgcacgcaaacaggccaaggccgcacagcgacagcaatcgcagcatgctgatgcctcgctggtggatgacacgatgtcgctgtcttcagcggacgtcatgcactatgccaatggtgtcaactcgtcaatcggctcttcgcagaccgccgacacctttgccggaggcaagctgaactctgcagacgggtcaaccgagcaaagcagcggcaagttcaaaaacgccgcttctcaggccggtgattccatggatgttgccccaacgctgtttggctttggcagtggcggtacattgctcaagcatgatatgagcacactggtcaacgagactgtagagataagcgatgctggtgagctcctgaaccaggcggtcgcccagatcaatacttctgccgtgcaacaaaaaaccgccggaacccgatatctcatcgtggttccgacggtttaatctggctcaaagaggggagccagagcggcgacttacttcttcggcttcttgaccgggggttcgccgagctcgctggtctcgacggccacttcggtttccggtgcatcctcggcagcggattccgccgtgtgcttggccaccaggtcgaacttgccgattacacggccggcctgtgcgatgtcgcccaaagcggcgtgaatcgcgtccacgccctcggcagcggcggagagcgccacagacagaatcggggtcttcatggagaccttggcctcggacttgatcttgcgcagctgctccacagccttgccggcccaggtcagcagctcgggggaggcaccggtggcagcctcgacgtacggatccacaaccggccaagcggcgcggtgcacggaaccggaaccggcgtgcatccagctccacacctcttcagaggcgtacggcaggtatggagccagcagacgagcaaaggcatccaagcccaagcccagcgcggtgcgggcggacttcacggccttctcggacggcacattgccctgctcgtccggagttccataggcacggttcttgaccagctcgatgtagtcgtcgcagaactgccagaagtaggactcgatgacctcaagcgccttggagtgctcgtaagcctccagcgcttcggtggcctgacgcaccaccaaggccagcttggccatggcggcgcgatccagcggctcggtcacatcggccgggttccacgaagcctcagcggcttcgcccacgtggtggttctcgtcctcgcggccaatcgccagtgcaaacttggtggcgttcagcagcttgatggccagtcgacggccgatcttcatctggccgatgtcatacgtggcatcgaggcccaggcgcgcggcggcagcccagtagcgcacggcgtccgcaccgaacttctcgatcggctcgttcggcaccacgacgttgcccttggacttcgacatcttcttatggtcgggatccagaatccagccggacagcgtggcgtgagcccacggcaggcacttgttttccaagtgcgcgcggtccacggtgctgaacagccaggtgcggatgatgtcctgaccctgcgggcgcagatccatcgggaaggtggacttgaacagggcctgagaagcctcatccggctcagcccagtgggtcacgatctgcggggtcaccgaagaggtggcccaggtatccatgatgtccttttcggcggtgaagccgccgggcacatcacgctgagactcgtcgtagccttccggcacatcgatggtcgggtcgatcggcagacgatcctcgctcggggtgatcgggcgatcgtaatccggctcgccggaagcgttcaccgggtaccacagcgggaacggtacgccgaagaagcgctggcgggaaatcagccagtcgccgttcagaccgtgcacccagttctcgtagcgcacgcgcatgaagtcggggtggaagttcagttccttgccgcgctcgatgagttcggcgttcagcttctcgtcggtgccgccgttcttcaggtaccactggcgggaggtgacgatctcgagcggcttgtcgcccttctcgtagaagttcgtcatacgcttggtcggcgtcggctcaccgtccaggtcgccggactcacgcagtttgtctacgatgaccttacgggcggagaacgtggtcttgccagcggtctcggcaaagacctcacggccggccgggtcggtgatccaatccggggtgtccatcacgatacggccgttgcgctgaatgattgggcgggtgggcagcttcagatcgcgccaccactcaacgtcggtcacatcaccgaacgtacagcacatggcgatgccggcacccttgtccatttcggcggccgggtgagccagaatcggcaccttgaccttgaacagcggggagtagacttcctggccgaagtactgcttgtaacgttcgtcattcgggttggcgatcagcgaggtgcaagcggccagcagctcggggcgggtggtctcgatgtagattggggtgccgtcctcaaagcggaaagccactttgtggtagaagcccgggtattcgcgggactcaagctcggcctgagccactgcggtctggaaggtcacgtcccacaggccgggggcatcctgctggtaggcctcgccgcgggcaaggttgcgcaggaaggccttctgagccacgcgccgcgggtgctggccgatggtgtggtaggtctgcgaccagtcgatggacaggcccagcttgcgccacagggcctcaaacagcttctcatcctcggcggtgagcttctcgcacagttcgatgaagttcttgcgggaaatcggcacctgatccttggcgtcgatcttcttgccatcggtgccctcgaacggcggcttgaagtccgggtcgtaggggagggatacgtccacgcgcacgccgtagtagttctgcacgcggcgctcggtgggcagaccgttgtcgtcccagcccatcgggtagaacacgtcatagccgcgcatgcgcttgtagcgcgcaatcacgtcggtgtgcgtgtaggagaacacgtgacccacgtgcagcgaaccggaaacggtgggcggcggggtgtcgatggagtagacggccttacggtcgcgggtgttgcggaatttgtaggtgccgtcttcgtcccagacggtgcgccacttgtcctcaagcccgtccacgccgaccttgtcgggcagcggggtgagttgcgcgttgatgatggaattgccttcagtcataaggccaaagtttatgcatgttgcatgacaaggcgagccgtggaaggagccttacttcaccgtgaggtcggccaacggcatgcgctggtcgatgagcgctgtcggatatccggaaagcttggtggaggccacggtaaagcatttgcgcgtgtacagccagttgcttgccacatcttcgctgagcttgcgcgcatagaccttcatcttctcggcatagtcggcgtcgttggtggcggcacgggcatcggcataggcctgctgcgcctcggcatggttgtaatggaagatggaattcggatcggcaaacgtgccggcgtcatcggtgccattcatgctcatcagggtcagttcccaagtgccgtcctgaatacgcttggcatattcttcgtcagatacgacttccagattcaccgaagggcgcggcagctgttcaatctgctgcttgatggtctcggccatcggctgccactgcgcggtgaccaccaaatccaccgtggtcagataggtgccgaaataggaggtcatcgtttgcgtcttggacatatcgtgcgggaacaggtcggtcaaatcctcatatccaggttccaacgggctgatcggacctcccagcgcaccgctggagtctggctgcgaggcggcgatgccggccgaatcgatgaggtatcggaacgtggtgcgcacgttctgatcggacataatcgaatcggaattgttgttgaacgccagcagcaccttatctgtggtggcgccttcggtgacggtcagaccgtccttgccgttcatctgcgatgccacggtgacggtggcgggtgcggccatatcgatagtgcccttggatacggcatcggccagcgacgtctcatcggaatattgggtgaatgtcacggtaccgacgtgcgccttggtgccgtggtagcccccgttgtaatcgagcgtcaacgactgcccgggcgtgaacttgccaacggtgaacgggccggaacctactgcctgcttggcatagtcggcatcgcccgcttcggaatcgtacacaatgcccagtctgccggacaaggcacgtagcaacgtggggttggtctgcgcaagagtgatgaccacggtggagtcattcggattggtggccgacttcagatcgcccagatcatccacgccggcatatttctgggttatcgcctgttgcagggaccacaccacatccccggcatccaacgtgtgcccattggagaaggtgagtccggaggcgatggtcagggtataggtcagcccgtcatcggatgttttccaatccgtggccacgcccggcttgagctggttgttctgatcgacggtcagcagtgtttcgtacacgttgtctagcagcagacgttccgccgaggccgatgccgtggcacggatgtccagcgattgcggcatatcggtaataccgacggacaccttggtatccgggccggaatccagtagacccggaatggaatgactgcgcgtgattaccgaccagcagacccataccagtgcgctaagcactgcggcgactactaggaagaccacccatctcaaccactcgttgcgactcttatgcatgcccatcagcctaacgagagtgcgctaccgaacgctatttcgcgctgatgcctgcgctggggcaggtggcggccagcgggcagttggcgcagtccggcgtgcgggcatgacaggtggatcggccgaacaggataagccgatggctgagatccgtccactcttcaggtgggaagcatgcggtaatctcccgctcgattttcacgggatccagatgagtggagcgccaatccgatcgccagcgcagacgaccggtgacgcgcatcacatgagtgtccacgggaaagccgggaatgccgaaagcgttgcccagcaccacattggcggttttgcggccaacgcctggcaggctggtcagctcatccatcgattgtgggacctggccgtcaaagcgttcgtccaatgccgtggccaagccgatgagatgctgggttttcgaccggtagaagccgagcggatggataatatcctcgacctgagccgggttggcctctgccaaatcatgagccgtgggatacgtggcgaacagttcgggggtgaccgtattgacacgcttgtcagtggtctgggcgctgagcacggtggcgataagcagttgaagcggggaggtgaaatgcagggcgcactgcggttgcggaatcatacggcataggatgtcgtattccttgtgcatgcgctctatgcgcgcggttttggtttctcgcatgggaggtgaaacctgtgagccgtgttacgcggcggtctcttccgtatcggcagcgtcgtcaatggaggatgccttggcggcctgttgtgcggcggcatcgcccttgtcgttttccggcggatcgaagcgatatcctacattgcggactgtgccgatgagatgctcgtattcgccgccgagcttggcgcgcagacgacggatgtgcacgtcaacggtgcgggtgccgccgtaatagtcgtagccccacacttcctggagcagctgggcgcgggtgaacacgcggccggggtgctgcaccaagtacttgaggagttcgaactccttgtatgccagatcgatggggcgtccatgcagggaggcggtatagccgttggtgtccacgatgaggtcgccggagcgaatctggccatcttccaccgtggcggtggattcggcgggagaaccggctgctgcggctgtgggagcgttgccgcgctcggagaccaatcgcaatcggccctcgacttcagccggggaagcggtggtgaccaccacatccgcaatgccccactgggagttgaccacggtgaagccgccttcagtcagcaccagtacgatcggcgtggataggccggaagcgtggatgaggcggcacaaggttttggcggtcgccagatcatcgcgtgcatccagaaacagaatggtgttctccggcatcttcaccaagctggctgcatccatcggcagtacacggacgcgatgagaaagcagggcgagtgatggcaaaacggtggcggggtcgctggcgaaagtcatcaacgtaagatccgtcacgctaatccccctttatcctgcaatgtgttacgcaattgcttagtgtggccgtacgagtcgtcagcggcgttatgccgctttcgcaaagttttcattattctacgcgcttgtagtggacacataggttacaagtttgcggaatatggaacggcggacgtccatcaaccgatgatacggccgagcaccagtgcggttgcggcgatggtcacgcccatcagcattaccgacatcaggccggtgccgatccacggatagcggatatccgggtccggatcggcgtcgcgcacccacaacgtggaggccacggccaaggccagtcccaaaacgatgaggatgatcagggcaacggttcccgcaacggtgcccttggcaagcattgcgcccaaatcaggcaggaagcaccagccggccacggcgagagccgccacaccggaagtcacggcgtgggacagggcgcggatgagatggtcccgcttctcgcgggccatctgacgtccgaacgagaagaccaccaacatgaccagcagcaggcccatggccaacgcccacgaataccacggaagcgtcgaaccatccgcggcggtctggtccggcggcaccttgccggcggggaacggcacggtgacgaacatcagggaggccgcgccgaacagcaaggtgacgacgcgatccagcatcgtgccgcgcaacggccagaagacaaggaacacgaccagcgtcaggcaggcgacgacccgggggacggtggggtcggcgccgggcagggtgacggccgcggccgcgatgagcaatgcgtaggccgacagctggaccagcagcatgcgcagaaccttgttcttgcattccttccaggtgatttcggtcatggtacgcctctcagataatcgaatcgctacgtcaatcctacgtcgggcgttggaacggtgccgtcgagcattgatggccatccgtggcgacgagatgcgtgacggcaagtcagaacgcgatgacgcccagatgctccagcagcactttgacgccgatcagaatcaacaccacaccgcctgcgatctgcgcgggtttctgccagtgagcgccgaaggcgcgcccgatgtacaggcccgccgcggagaagaggccggtcaccacgctgatgcagaggatggcgaacggcacgctggttgccatgaacgccagactcacgcctacggcgaaggcgtcgatgctgcacgccacggcgagcggcagcatgtgcttccagtcgaattgcgcggtctccttggcgttctccgcgtcctcctcgtatgcctcatgcaccatgttgccgccgatgaacgccagcagaccgaagatgatccaatgatcgaatgcggttacatacgcgctgaatgcggaggccgcgtaatgccccagtatgaggaagagggcctgggtgccgccgaaccagagcgccgatctgacggcatccccgggtcttacgcgggagacggtgagccccttgccgatggagacggcgaacgcatccatggcgacggagacggaaatgagcagggtctgaacgattatcgcaatcatgatgtgatggaaggttcatcgcccgaactccagacgatgggcctcgaccagcgttcccacacgccgcctacgcctagttgaaaaaacagtctataagtatagcacagaaacgaagaaaagcccttcctgaagggctgtcggcctggtggtgcaggtggctatcaagcagagcgcaaacaacaaaaggcccccgaaggagccttttgtaagttattcagcgattcagagccgaatcacttctcggaatcggcgagacgctgacgagccgcaacgatttccttctcggcggcttcaacgccggtccagtagtcgcccggcagaacttccttgcccggctccagagccttgtactgctcgaagaagtgcttgatttcagccttgtggtactcgttgacgtcttcgatgtccttgatgtcgtcgaaacgcacgtcggcaggcacgcacagcaccttgtcgtcgccaccggcctcgtcaaccatgtggtacagacccacggcgcggcactcaaccacgcagccggggaacacggagttcggaatcatcacgagagcgtccagcggatcgccgtcctcgcccagggtgccatcgatgtagccgtagtcatccgggtagcccattgcggtgaacagggtgcgatccaggaacacgcggccggtctcgtggtcgacttcgtacttgttcttggagccgcgcggaatttccacaacgacgttgaaggtttctgccattggttatctccttgtttggaaactattcgttacacacactactactgggcgggcaccccggctatagctgtgcccgcctttcgtttcactgcacggacaggatatgggccacgtccgcccatggggcgagcgagacgtagttgtcccagccccactggaattcacgaccggtgagttcgtcacgtacgttcagcggacgatcggtgggtaagcccagctcatcaagatccagatgaatcattgcctgatgggcgttgtgtccatcaaggttgaccaccacgatcagcgtgtccgcgtggccggtgccggtcagctctgccggtgtatggcgggcgaatgccagcacgcccggatcggaggactgcagcacggtgaggttatggtagctgcgtgctgccgggtgggcacggcgaatcttgttcaacgaggtgagcatctcggccacgccgaactgcttggccttggaccaatcgcggactttgacctcgtacttctcgttgtcgatctgctcctcaaagccggggcgctgcttgttctcgataagctcgtagccgttgtagatgccccagcttgggctgcccaaggctgccagcaccgcacgcacgcagtggccggcgatgccgttgtcacgcacgtatgcggtgaggatgtccggcgtggtgggccagaaggtgttgtgctggtagtagccgtcatcgccattggtggtgggcagatactcctccagctcttccttggtgttgcgccacgggaagtagcagtgggactgggtgaatcccacgtagctcaatgcgcgcatcatgcccgggcgggtgaacgcctcggccagaaacaggatttccgggtgctttttggtcactgcggcaatcacgtcctgccagaaacgaaccggcttggtgtggggattgtcgatgcggaagatggtaacgcccgcctcgatccacaggttcataatgcgctcgacttccttctcaatgccggccatgtcggcgttgaagtcgatcggataaatgtcctgatacttctttggcgggttctcggcgaaggcgatggtgtcgtccggcttgtgtttgaaccatgccggatgcgccttgacccacgggtgatcgggggagcactgcagggcaaagtcaagtgcgatttcgaggcccaactcgtgcgcgcgctggcacagtgccttgaaatcgtccatggtgccaagcagcgggtccaccgtgtcgtgaccgcccagttcggagccgatgccgaacggggagcccggatcgtcggggccggcgatcagtgagttgttgcggcccttacggttggtcacgccgatggggaagatcggcggcaggtagacgatgtcaaagccttcggcggcggcacgttccaggccggccatcgaagtctttaacgtgccctgcacgatcttgccggtggcgggattgatggtggcgccttcggagcgtgggaagaactggtaccaggcggcgaagctggacttcgggcgttctaccttgaagcactggggctggctgggggagatgccgtcgcgcagcgggtgggtgtcgtgcagcgtggcgatgcgcggattgtctccggcggccaggcgatcttcggcgctgagcgaagcgtcggccatggtttcggcggccttctccaaagtcttgcggtctcgtgcggtgagattggcatccggggttgctgcccagcgagccaacagttcagcgccggaatcgagcgcattgttcacgtcatccttaacgcgaaccttgatgcgggcatcatgcagccaggaaatataggtgtcttcccatccttcgacggtcacggtccattcgcccagctgacgtttgacggccgcatagccatcctcccacggcttcagatcgctgtggtcgccgcacttgacggtcaccacccaacgatcgagaccggggttcacgcatgtcatggggcgtcgcagggtttccttgccgcgtggattgcgcactatggcggtggcgcctaccttggtgcggccttcgatgaacacctgggcggtcatctcgaacggctcgccgagctccacgcgggcggggaagatgccgcgttcctcggcgggggtgatgtccatgacgttgatacggccgaactggcccggctcgttcacttcgatggtgggagccggcgcctcgctggcgaggccctgcagggctgccggcggagtcgctgttgcggtgcgggcccgcttgcgcttggtagtcgaggatgaggtcgtctttgacttcgcggtcttggtggagtcgctgttgcttgtgcgcgtggtcgcgcgatgttgtactgctgccatactgcccattctaaagggcttgagctcggggacgcgcattgtggacacttctggcgaaacgttctgcaaacggcatgaagtggataacttgatagcccagttatccacaactcgccgaaaaaacgcaagctcgaaccacattggcctaaaaccatgtgccgcacgccgccaacctgccatgctcgtggtctatccgcacgcacaaggatgtgcggttcaagcaagagattgaagaaaggactcgcgatggcattggcatggcggagaaagggcatgtccatactggccatgctgacgggattgatattggcgctggcaatggtgctgggtatggccggcgaagcctatgcggcgtcgctgagaccctccgagcagaatctgcatatccggtttacacacggcatttcactgcctttgggagtaatagggctggatacctcgaataaccattactactgcatggaagcagggcccatcaccgactacacggtcggcccggtgcgattgctgaaagacgaccagaatgcacgccgcatggcctggattcttgagcagtaccgaaaagctggcgcgcgggatcatgcggccgtggcggtgattatccaggatcatttcggcatcggcactcagtgggcgcagcagcgggagagcgtccggcagcagcacccggatatcattccgcgtgcggaacagatatggcaggaatcggaaaacaaagtggccgcggacgttgttgtggaacgcatcgatgccgtggcgctgcgcagcggatccgtggcggtgagtgtgaagggatacaacggtgagcttgtggaaggtgttccattcacggtaacgcttgaggggccggcgcattttgtgagtaccggaaaagctacgttctcaggtgtatccaccgctaccgtgcagcaccttgcatgggaagcagatggtcacggcgaagtaacggcaaaaaccacctacgagtacgggcgcttgcgcactatggacggcattcagcagctcctgggccttgattcgttcgtctcgacgggcggttcggcaacgacatttacggtgcgcaaggactttgctcctatggtgagtaccacggtctcggacaaagtggtcgatgccggttccccaatattcgatgatgtgaccagtggcgtggccgactccagcagtcactgggtgccagacctcgccttgcaagccgaagggtactactttgatggtctgactgccgatgatttgggcttggtcatcgaaccgcgctcgcaggaaagcgccgatggttttctggcgaggatcaagcaagccgggtatcgtccatcggcatacggccagacttcgttcaccggttcgggacaaactgtgcgcgtgcaagccatgaccgagcctggtggcagtacgccatatctggcaggtgaggcggatcgggccgatggcggtggaaccggtacgggcagtttcggcacgtgggtgtgggtgttccgtcgtgcttcgcaaagcgatgaggccaagcagtatcttgttcgggactggtccagcacgttccttgaagctgcggaaagcaatgtgaatcgtcgcaaggtcgcggtcgagtcaacggtgaccgagcattccgctcatgtgggttctgaattgagcgacaccataaccgtgtccggcttcccgagcgaccatgggtcgttcgccggcaatgaggagtatggattcggcgctgaccgcccgcatgccaccgtgagtgtgtggtggtccggcgatgcggatgatgccgtcaatgacgaggcatataaaccgactggcgccgaagtgccggctgaggatgagcatcaccgcttggtgggatcttgggagattccggcgcacaacggaacgttcaagttcggtgcgggatcgttggacgcgcatggcgagccggtgcacatcgttgccgatcagcatggctggtatgtgttcgtctgggaatttgcgggcgatgaccgtgtgatgccggcagcgagtagatacgacgatgcatgggagcggacgcgtgtgtttgagccgggggagccggaagaaccggaagaaccggtggaatctgaggagcagctgcctcatactggaatcagcatggtcatgccaagcgcagtggcggttgcgttcctttccgttggctgtacgatgcttgccatagtcaagcgccgcaggcggtgagacggcataacgcagaaggtcggaacccaataggattccgaccttctgaatgtggtagcggggcatggatttggaccttggacctctgggtatcccagaggtccaaggtccaaatccatgccccggctgattctaagtttagcggcgtgacacatgatgtgtcatgacgaaaaaatgggtagcgcccccgttatggcgtgaggaattgaccggatggctcgcggcactgaaggccggtggccgcagcgagcaaacactattgaccagacggcgaaaaatgacatacacggccgtatgtcttggcgtttcgccgtatgaggtcacctgcgagatgatgacacagtggttcgcctcgcaatcctggaaaccggaaacacgcaaagcgtaccgcaacacggtgtcgagcttcttcgtatggatgcggcagaccggccggcgcaatgatgacccaagcatggaactgccgaaagtcaaacgcccgagagcgcacccgcgcccgtgcccggacagggtgatattggccgcgttggggcgtgccagcgagtccgagagaatcatgctgcggctcggtgccgagtgcggtttaaggcgtggcgagataggccgggtgtccagcggcgacgtggttgacgatctcgttggccggtcgctggtggtcaatggcaagggcgacaaacagcgcatagtgccgttgccggatgatttggccgacctgataagcgcgtgcgatgggtacgtgttccccggccggttcggcgggcacgtcgaggaaagctacataggcgacagactgtcgagcctgctcggtgacggatggaccgcgcacagcctgcgccaccggtatgctaccgccacgtggcaagccacgcacgacctgctgctggtgtccaagctgctcggtcacgcgagcgtggaaacgacacaggtgtacgtggcaatgccagacgaacggctgcgcgcgggcatggccgccgtgctgctctcagcctgacagttgcgcccatgtgacggtcttcaacaccgcgagaatcaacgcgcggagcttggtgtcatcgggcgtgctgcctttcagattgccgatgcggtcgtaggccattagtcggctctccacacgtacacatcgaacgtggttttgtccacgtacatcgcgccggccacgccgctgccggtgggagcaccctgggtgaacacgatgcccggacccgccggaccagcggggccgggcgcgccggtttcgcccctggctccggcggggccttgcgcgccggtttcgcccctggctccggcggggcccggatcgcccctgtcgccctgcggcccctgcggtccctcgggtccgcgtgggccctgtggtccctgttcgccgcgtaggctgccgatttttccgaatgccatggttagttcctttcttggttgttggtgtagaggtccatggtgtccaagtcgaggtagatgtcacccggcttgccgtcgatggtcggggagccgtgcccggtgaggaaccggggcatgctgtcgatcatggttttgatgtcgccggtgatggcctgccatgcggcgaggttgcgtcccggtttgaacgtgcgcgggtccacgtccgtaagttccgcgtattccagcgtgccggccgtgtcgggcacggtgaaccaacgaatagacccgtagggcacttgctcgtcggttttccaacaccagtcgggaccggtgggctggatgtccacggtggcttcgccttcttcgtccagcaccacggtgaacgtgtcgggcaacaccacacttgcgtcgtcggcgtggcgggcggatggttggaacacgaccatgccgacgccggcacgggtgccgccgttggtcggggcgcgcaatcgtatgtgcaccatcgtcatattgggctactttccggccatgcgcagcggattgtatgccacgccgaaaccaccagcgataagaccgcccacggtggtgatgtaatcacccacggtcgggtcaccgaactgggtgaaaccgaaaccgaccgctacggcgatgagaccggccacatacgcgatggtgcgcacggtgttgttgaacacgggtgtgtagcccttctccgcgtccgtgctgccggtggccttgtggtcggccactcccggagtattcacggggtcgctcatttgcccgtccccttgtccttggtggtgatctggatgtcgagcgtggccaacttgctttccacggccttgcgcacggtgtcggcgatggtgttcgggtccgcgccgatgctcttggccatggcctccaatgcggccgtctgagccttctcgtacgcggtcgtcttggcctgcacgaattggctgatttgatcggcgcgcgccgcccacggggctttattgctgctgtgaatctctttcacgccggcgttcttcaacaccacgacctggtccgggtgtgataggccgacgcggccggtttcggggctccagtagtagcccacgccgctgtcgtcgtcccagataaccagtgctgtgctcatttctgtttctccttgactagatggattggttaacaattggttggcgcggtcgatgacccgctggacgggcagaccgttcggtgctcggtcggggcatccgtaatggtccgtgccgggtatctcgcggtgcagccacacgttgccgttcaacccgtcgtgccagagcttgccgagcccgtaacggcggctaatgtccgcgcacaactgtgcggacgcctccacgcatgcgtcggtcatgggcacgccttgcatgccgccttcatgctcgatgctgatggtgctgttgttgctcgaaaaattcgcgtcggaatatgagccgtcggcctcgctcacgtactggtgaatctcacccgtgccgccgatgccgtaatgggccgaagcctgcgaactcggccgctggaaaacggcgtcggtgccggcgagacggccgaccatgatgtgcagggtgatgtgagtcacccgatgcccgttgcgcccgttgtaatggttcgggctgggcacttgtttgatgttcaatgccattgttgtgtccttttagttgtcgtgtttgaacaagccttcgggcgggttcggcgggggtggtggcgcgcccctgtatatgtggtcgatgagcgcgcggttatgctcccacaacagattcatgtcggccatggtgtccttgagttctgtttgcgcttcgtggagcatgtcggcgctgtgttcctcatgcgtggctttgttgttgaaccacgccacaacggcctgcacggcagcgccgaacgcgacaccgcacgcgccggctatcgcggtgatgaaatccaccatgtttcctttcaaatgagacgggatcgcagggttacgagtccggcaccgtcaccctccagacaacacagttgggtgcggcctcggtccggttcaccaagcacaagaccaaacccaaggccgtgctcgtaacccgcgtcagaaattcccaagacggcgacgacagagccagaatcttcaacccgatagtgtgggatatcaccgccaccgagttccaagtgcgtttctggcgtctggacacgcacaactgggccgagtcctggccgctcacgttctcttacctagccatctggtgacctacttccagagggcgagccagtagaacttcgtcggctgattgccggcccaggcgttgctatcgttcctgcgaaacctgacctgagcgccattattggtcagctcgtacaccattgggctcaggaatcggttgagctcatcggacgacgttctcgccagcatcaccagcattgcctgaggagacgtggagtgccggacccaatcgacggtgaccacaccgttttgatcggtgcttgcgtcggccacgccgaactcataaccctgcgttatcgcggcgatctgcgattgcaatgagttgatttgcgtgttctgcgcgtatttcacccatgccgaaccgttccaacagtaaggcccgttgttattgccgtctgaggtcacgtagccggtttggccggtggagcctctcatcgtggcgagcgtggcgagcgtgcccgctatgacgggcttcacgccctggatggtcgaacgctggtccaccagtttcaacgcggcttccgtggtttccgccgccttacggaaaccggcggccgcgttcgatactaggtcgccgccttctatgtagctgatgccgtagatgggtgtggttttcattcttggtttcctttccagttcggccggtcgatgccggtcgtgcttggcggtttgtcgaaaactgtgaatcctgtcaattccgcgaacgtgaacacgcattgcgcgaaggtggccggccagtccgcgaagtcctgccagcgcatgccggtgttcgctgtggagtcgagcgggtacatggtcgcttcatgggtcatgccccgcttgtgggtgaacgtgatacgcccgccgatggtcgtgaacgcgccggagaacgccggtcgcccgtccatgccggtcaacgtgctcaaacgtatgccggtgataagcacgggaccggagggttcgggacggaacaggtgcgggaacgacaccgggtccaggttcgttccaatgaacttaatggactcgttgcgcagccgtgtgtcgtgcgtgacgatccacgatgccgccgcctgccgttgcgcgtcggacggggcgaacgtgccgcccgtgtgcaaaccaccggagtcgtcgccggtcacggcgtccgaatcggccgtgacgcttttctgcgtgtccgtgagccgtgtgggcagacggctcaaatccgtgtagacggtttccatgtcgtcgtattccaccacgccgttattgttcttcgcgcgtttggttttggccacggcctgcgtgaccggctccatgatggacagttccaaatcgccggccacgagattcgctggcaacgtgtcacggtgttggccgtccacgagcacgtacggcatgccatccacgcccacatgcacctgcaccgatccggccaacgacagcgggcggagggtgatggtttcaccctggtaatgctcgtaccatgcgggcgcgggcatgacgtgcgcgtacatgcgcgacagcaagtcaagttgcgacgggtaatcgtcggtcttgtacgtggcgactgccgggggcaattgcaacgattggggttcggctatgggagcgcccgcctgttgggcgcgcttgttgagttccgccagccgcgcggccggggtgccgacccaatggcgtcccgcgtgcttcgcctcaccgctggtggggccttgtgattgcaggcgtttccacatgaccatcaggcttgtggcggtcaaatggatgcgccacctgttgcccaagtcggtgacggtgccgccatggcctatcgtgccgatgaacagggtgggcacgttctcgcccggagcctccggtgccgtgggcacgtattgctggtgcagttgggcgatggtgccgcgtatccgatcccatgcgcccatgctgtcgggcagcatgtcccacgtgggttccgcgctgagttgcaccagcacgcgcgagcccgacaatgtgacggccttgccggccaagtcgccagcccggtcgatcaggtcgaacgtgagcaccgccggatcgggttggctcacgggttcgtcggctccccacgtgatcgtgaaatcatccaacgcggcgatgtcctgccgatggtcgttgaccggcttccacccgtcgccggtgtccaagtacatgaatggttgttgtgccatcagcgtcgcacaccctcgtaatcggctaggagtttgcggatggccttggcggtgccgtccgggtccgccacggtgccgtcgatgtgaacctcgtagttgttgaccacggtcgtgcccgccaagcccgcccgtgttccgttgagcatggcggacatgctcgttgacgctaggctggtgttgacggatgcgatggcggttctcaccttgccttggaaacctgtttcaagtccctgggcgaagcccgccatgatggctttgccgtgcgggatcagcaggcgacggtcgtagctgatcggccccttgtgcgaggtgatccagtcggctatgcctcccacgaaaccggtcacgccgtcccatgcgcttttcaatccccggaggaaaccgtctatgatgcttttgccggcgttcacgagcaggccgcccacgttgcccaatgcggagaggatacggcctgggatgctggagaagaagccgaccacgccgttccatgcgttctgcgcgccttgtgccgcgttctggaagaacgcgccgattctgccgggcaatgattggaagaaaccgattatgttgttcacgcaattgcccatgaacgcggtgaactggctccagatgttgcggccggtttcggtttgggtgaagaaccacgccagcgcggccaccaacgcgcctatggcggtgaccacgatcatgattgggttcgcgttcatggcgacgttcaacgcccattgcgccacttcggcggcggctgcggcgatgctgaagccctgcaacgcggccaccacggcgctgatggcgctggccaccttgaacgcggcgagtccgccgccgatggccaccagcgcgcccgcgatgggttcggcgttcgcgctgacccaatcaccgaactgggtgagcttgtcggccaccgcctggatgataccggccgcgccgttgaacgcgtcgcccaactgggtgccgatgcttcccgcgtcggacaatccttgcagtccgggcgctatcgtggtggcgatgtcggagaacgcctggtccatcgagccgagcgcgccgcccacggccttcacggtgtccgcgagggattggaacgctccggtcttgcttatggagtcggtgaaccgcttcaatcctccggtggctttcgcggcgaaaccggtcacgctgtcggcggcttcggtgagcgctccggtcaccgtgggtttgaacaggtcgaacgcgtctgtgagtccgcctgttatggcggcttccagattgcccaacgcgccttccatggtcttcgtgctcgatgcggcttccttggcgacgtcgctcatgcccaagtccatgatggccttgttgaactcgtccgccgatatctcgcccttttccatcgcgtcgcggaaattgcccgtgtacgcgccgttcctgatcatggcttcctggagtttgcccgaagcgccggggatggcgtcggccaactggttccagttctcggtcgtgagcttgcccgcgccagccgtctgggtgagcatcatcgccacgcttttgaacgtgtcggcgttgccgcccgccacggcgttcaggttgcccgccgcctcggtcaaaccggtgtagtcgctgatgccgttcgcggccaactgggcggtggtgttctgtatcgttgagaggtcgtacacggtgcggtcggcgtagtcgcgcgccgcctgtgacgccttctccacgttcgacgtgtcgatgcccgcgaagttcatggtctgcacgaacttgtcggtgctgtcgctcatgtcgatgacagcgccgccgaagtccttgagcttgtcccacaactcggtcacgcccttcaacgcggcaccgcccatgaagctgccgaaggtcgccgccttgctggtggccttctggaacgccttcaccgcgtcgtcactgttgccggtgatgcgcaccgacatgatcgcgctatgagccatcgttttccttcattcgttcggtttcgtcctgcaatatctccaccgccgtcgcccaatcaaattcgcttgccttctccctccactcccacggggtgccgccgaaatagcgggacagcaggcaagagagacggcctagcgagtcgtcaggccacgcggtcagagcgtagggtttgctggttccgggtctttctgttcgagcgcgatgtcgtccacggtgtccatccactcgtcgaagccgagcgtggtgtgaccggcgttgcgcatggcgatgaacgcgagatagtaggactggcggattcggctggcgtcgcccgccgcccatttgttgatctgggcgtgttcctcggcctggcacagggcgcgcggcgtgagtcgcgtttcctcggtgcggccgtccgcgtaggtgactttcacgatctgcatgatctaggctccctttacttcgttgagtgtcttatcgatgaattgcctgtagacgcgctgccacgcgccttccgtcgaggccacgccgttgttgacgaacaggcgcggcttgatgcgccgggctggccacccgtagttgatgacgcccgcatagggcacgcttttgcttcccgcgcggatgacaccggccttctgtgtcgccccgacacggattgatgaagccaacctgccgttcttgccgcgcggcgcgagattgcgcaccgctggcaatgcgatgttcgcggcctgccggttgacttccttgagttccttcatgtccgcgcccgccttgcgcatggtggacacgaaccgtttttggcctaccacgtaggcggctgtcgcggccatgctagttttcttcttgcgcggtgatggttccgctgtaggccgtgtggcggaggttggtgacggggaaactgaaatcgttggtgttcttgcttttcacgtcgccaccgatgctcacggcgctcacattcacgttgcccgtccacttgatcttgcccttgttgttcggcacccactcgaacggcatctgctcgccagcgtggtcgaagcaccacgcgctgaggttgtcggcgtcgaagtcgtccacgatggtgccttcaagcgtccaatcggtgcttgtgctggtgtcctgagagccgtcgaggaaattgatagggtcgtcggtgttgttcgacgccgccaattgcaccttggtgacctgcgcgctgaagtcgcgccccttacccgtgtcggtgatggtgagcttgcccggtcccaatgttctgattgccgccatgattgtgtcctttcgattacatggggttgagtgtgatttcgtatgcggcgagcgttcccgcgcccgcgaggtcgaagccgactggagtggccgtggccatgttcacgtccgcctggtgcatgatgtccatggcttctaggatcaggtcgtagccgcgcgtgttcgtgttcgccgttcccgccaccgcgagaatcttgaacgtcacgtttggttccagttcccagccgtcccaagcgatgtcaggcggcatgatgaccaagctgaccttgcccggcgatggtttgaccagtgacgggtctgtggtgacttggaggatcaggccgtgcccggcttcggtgatgcgttccgtgagctgttcggtgagttcgtccactcggctcatgcgatgcccaatcctgcgggcaagcccgccgccctgagcttcggccaagcggtgcgcaacgggtcggtggggattctgaacggttccacgccgtccgtgattcccacgatgccgtttctcgcgtccttggcctgccacaagtccaaagccaccgacagcgtgcagtcgtccaccacgtccttcgggatgccgtagccatccacgtgcggggagaggtaggcgcgtgccgcgcggagcctcgcggccaaggccggacggtcgtcggtgtcgagcgttccggcctgccttgcgagttcattcagaagtgggtcgtccgccatcaggccgccggtttctcggccacgttcagcagggtgcgcaccgccgccgcgtcacgcgccttgagaatgttcttgccgatgtcggtcgcgccgccgagcgtgtcaacggtggtggcctccggtgccgtcgtgccgccgatggctgcgcggagttcattgatcgcggcgatgatggtcggctcgaacgcggggccatacgtgtcttgggggatgctgggtagtttggtcttccattccatggtcgggttcctttctgtcaggcgttggcgaacttgatgggcagtatgccttcgggcaaggtcacgccgaacgcggcgtagccgtacacgctgaagtctttggtgaggttgagtacgttgtcgtcctggagctggaacgggctgttgccgttctcccacacggtcacggctcccttgtcgaggaacgcggcggttcctgcggccgcgccgggcatgagcaccactggcacgcgaagcagtgaaccggtgatgtcggtcgtgtcgatgctgccgagccggtcgatgccgccgccgctgatgtccatgaaacggtcgccgtcgtcgctcaggtgggcgatggccttgaacacgtcgccggaaacgccgagatagtccaatgatgtgttgcggtcttcaacctcaaggcgcgcgtcgatgatgatgtcgagccagtcgttcggggtcatcgccgtcaatgccttgcccgcgtcgattttgtccgaggcggacacgtcaccgatggcaccgtagagggcgatgcgggtggcggcttcggtgttgcgcgcgtacgccttgaccaacgcctcaagggttttgtccaagtagggcacgctggcgcgttcgatggcctggcggctcagggacgtgtagccgccgtaggtttcgatggtcgcggttcgtgccccgatcttgatctcgccataggggaggtagtcgccttccttggcctgcttgtctacggtggtggtgtcctcggtgacgatgggatagctcagcgtctcgccttcggacggcagcgcggcatgtgacacgaggttggtgatgcggcggcgctgttcgaggatgcgaagcgtgttgctgatccataccggctgcgggtcgctgttggcgagcacgccgcccgtgtagtcgcgcttgctgatctgctcgtagtcgttgcgcgcctgttcgtcgcccttggcgagctgcttgagcagatgcccgtagctgcggtaggatgcggcgggattcgagctgccatggttgttcatggtggctaggctcgcctggatgctgcgcagcacgtcggcctgttcggcctgttccgcgcgcaccttttcgatggtttcgttttccatgtggttcctttcctggctgttctcggtattgaggttgcggtggttctccaccttggcgttctggtatgcgggccagctcaccaaactcacttccatgaggcgcacgcggcggcggtgggtcacgttgttttcgtcgcgttcgtcctccaacgggacgaatccgacgctgagcgagtccaacgcgccttcgtccatcaatgccaccgcatcgcgcccaagctgggtgtcagcgattcgtgcggtgatgtgaagcccgtcgtcgcggttctctgccgaagtgatcgcgccgatcagttcggcgtgctggtagcagagcttggccgtgtcggcgttctcgaaaacggtgtcacggtcgaacgtttccgccccgtcccacgggtcgttgtagatgtcaccgaacgggacggccacgccctcgatgctgcgcccgtcaccatctgatgctttgcggagtttcaggccgcggtaggcgatttccttgcgttcgttcattcggtttcctccaagtcgttcgatggttgcggggttggtgcggcgggtagtggtggcctgccttccatggcacgcgcctcatctacggtgagcacgttgcacgctatgagaatctggtaggtttcggccttggtcttcgtgtcgcttcggcgcatgctgtcccagtcgagttccacgctggtgccgcgcggcagcacctcacccaacgcgagttcgatgggctgcgcgtaggcttcaagagtgaagtccgcgaactgtatccattcctgttcgatattgctgtaggtgaggttcgagccttccaccgccgcgagcatgagcgaagcggggatgcccaacaggcgggctatctgcgtggtgtcgaactgctgcgtctccagaaactgcatgtccttgggactcagcgccagctgggtgtatttcaggtcgccggtgagcaccttcacgtcatcaacgttgcgcttgaaaccttccttgaccttctcggccacttcgtcgttcaacggcttcggggtgctaatgatgcccgtgggatgcgtgccctcggaaaaataccttgatttgtaatcgcgcgcgtcgatggctccctcgatctcctcgcgcgccgcctcgatgggccccatgccgcgcaaccgtcccggcaccttcaagaatctgagatgaatgatgtcgtttgacgtgtattcgcgccccatgtaccaatagcgcttgtcggggttggcgatgtcgccgcgagcgtcggaaacgctcaccaacgctggcggcagattccgcaagccgatggttgagccgtccacgcccttcaacctcagccagaacgcgttgccgttcaacgccaagcccatgacggtttcgctgatgaagtccgcccgccacgtgtcggggtccgggcgttccacgatccgcgcgggttccacggccatgccatgccgcaactggcgcacgggcaagccgctgactgcggtctgcaatatctgcacgcctcggaacacgaccgacatgttcaacgggtcacgcccggccggacggcggaacggcgcggtcgccacgcttgacacgcgattggcggaacgcttcaccgcgccccacatgttcgccatcatctctcgtatgctcatgccggacatgatgcgcggcatggcagcgccacgccaaaaaataccggccataagcggccatagcggccataagcggacacgtcggccacgttttagtacactccgggcggtgtgtcgtcgggcatgtgcgtcaatccccacagggcgagcgtcgcggcctcgatggtcggcgcgttcacgccctcagccctgttccacagccaagcgtcaccactcatgcgcttaccggccaaacccgcctcacgatccatgtctgaatcgggcgcgtgattcaccgcgtgctgatccaacgcgctcatgaacgcctgcggcgcggtcaccgcgtcagccgccctcatatccacaagctcgtaacgtgctatgccccattcatccaagctcaaacgcaaccggtcggccaacgccgcggacggcccccgcatgtcgatgcagatgggcgcgtggtagcgttcctgcaattccctcaatcgttccggcgcgctgccggttcccggcaacacgtccacgacctgcaacaggggcacggcctcggtctcgatgcatgcgactatcgcggtgccgatgcctcccatggccacggccacgccgaaacacacgcgcccggtggcctcagccggatctatagcgttggcgctggtggactgccacagttgcgggtctatcgcacggtcgatgattcccgaatcccgcaagttgccgaaggcacgcgcccaacccgccgcgtcctggctgaactgacggcggaaatcggccaactggtcgtagtcgaacaaatgcccggcaccgggatgatgcgcccaaatgttgtccaagtcttcgggatcactgccgaacggtataccgaaatcgaagaagcaggttcgtcccatgggttcgcccgcgtccatcatcgcccgcaactcgtcaagcttcggattgaaaaacgtggattccgccgtgccctcggtcgaacagaacgtgagccgtggccgtacgccggtaagcttcaaacgcgtggtggtcgtgggaaggaaaccgtccaggatcgccttggccttgtcggctggcagcgcccagcattcatccaacgtcagcgaatcaccctggaagccgtggccgccactgtcggtcgtgccgcccggctgtatcgtgctgccgttcttcaacgtgaggcacatgctgccgttgctcatgcgcttggaagcggccaacggagccagcggagacttgtcgaaaccggtgatgtactcgcggaactgctgggatgcgtccttgccggtctgcgccagataccacacacgacggttcggcccccacaacgcgttgcgggtttcggtcgcccgctcgcgcgtggttttcccggcctgccgttgtacggtgagcaccaaagtgtcgtaatagtaggtgccggtgtcggggtctatctcaccgaacacgtcggaaaccatgcgctgccatggcaagaacggggtgcccaacgcttcggctatgcgggcttccttgccgccatcggtcggacgcgcaaggttgcgcggggtcgcgtagcgtggtttgaggctgggggtgggtttgacgctcatttcgccatcgccgccatgagttcctccagcctgtcgtcagtctgggaaggtgtggacgggtagatggtttcgagctgttggatgtagccgagcagggaggtcatgttgcggcttatctcgcggccacggttgttctgcgcgtcgatgttgcgcgcgatgctcagcatgctcgaatacaggaaatcggccatggcgttgtccgccttgccttccctgaacctgttgatgaacttctcggtcgctttttcctgcggccccttgacgattccggcgtcctccaggccgtcgagtccatggaactcacccatgttgttgcctccaaaccaaaattgttgtagattccctaattggctaacgaatcagtccgaaatcgtgggttccgtccctgttttcgggcttttttatttggtttgtggggataagaaaacggtgggcgcggggtatcggtggtgcattgcggcttaaaaaacgggcggctaccagcgaggccgcgcccgaaccggcggcgaagaggccacgactggcgtggtcggttcgccatcgcgtaggccaaggctcgcgagcctcgcgcgcctcgccttctgccttgagtctatgcctgcctgggtgatgccgctcctgtaccactggcgcatgctggccagctcacgccgtccggccttcagttcctccagccgctccaccaccacgggcttgccaggatcacacacgtgtatgtcgtagtccaacgccagccattcgtccaataggcgcgggcttcgctgtgtgccgggcatgaccttgaccagccacaggctcacgggtttggccagcgtgaccgcgttgcgataggctccctgccatgccccggccacgaggtcacgcaccgcgtcgggcacgggcgtatcgtccggcatgcccggcatgagcgcatccgccaaccggtcgtaatccacgatgatgtcgcccggctgcatgtgctccaacgcccacgtggtcttgcccgcgcatggcggaccgatgaccgcgtggatcacgctaggccaaccggatagtatgcgttcacgacgcaagccgttgcaatgcctgcacgcccgccgcagattcttgacgatagtgggaccgccgaacacgtggggcacgatatggtcggacgtgtcgcccaccttcgtgcatcccggcatgttcagccaacagtcgttgccgtaccgtgccaccacttccgcgcttatcgcgggcggcaccctcaaacgatggtcaacgcgcggcatgatccgccctgaacctttccaagcctcccagcggatacctgcacgtgcggtctgaatacctaacatacgcgggaccgatgttgcggtttcgccacctgcgcatcgtgcgggtgctcactcccaagtattccgccgcctgagccgtggtcagatacttgcccgccatcaacgagtccacgccttcaacgactggatcaggtcggcgcggtcgaacacctggcggccacccacgcgcttcggcttcgacacgatgccctcgctcaccaattgctgcatggcatggtcgccgtccgggtcggtgtcacggctgatgcaatccaagtggagaatcctgatggcgatggaacgatccacggtatccgctccggtggtgtcgtactcaagcttgggtagattccatttcaccgccttcttcatgtccttcgccctgatggccttgctggtcacatgctctcgacggtacttcttcttcacctttctgcgcttctgctcgctggtaggaatgtaatcaaccgcatagcccatgatgttgcccccaatctcgtttgtggataagtggataagtctctgaatgaatcgtttgtagatttcggatggtggaaggttagagcggggaaccctaagcggaaaaacaagaatccgaagattcctgaatttccgaagggttcccacatgcaaagcatttcggtatggagccaagccgtcgcatatggtcagcggcacaatgccgcgacgaaggtcaacgcacgtgccaccccacgcatggggtcgatggtgccgctttcgtccctgggaacacgacacgtgcgtttagctcaacccgcacgcctccccgctagggacgcttcaaccaccacgccacacgtggtgtgtttgtaacgcgctgggcaaggcgcggccgggtgcttcatcccgcctcgcacgcaaccgacggtcggcgtggtcaaaggcatattcggttatcgacggcgcaagccgtcacagatcgccgccgcgtcttcgccgcaccgcatcgtcacgagccaacgaatcagtcacgcacgagcgcaactgctccaactgcgggcgggtcagcaccgccgccgcgcgaacatcaccggaatcgaacgacacacggaagatacccggataggcctcgtaattatccacgcagaccctagtagccgtacccataccgactcctctcgtcatcgtcgtcccacagccaccgccagaacgcgcacaaaccaaccgccagcagcaccatcggcaacacagccagaacgcataggcagcgcagcaccgtcctacaaagaccgcgcatgcttcgcctccctaatcgcacgagcaatctcacgattgatcgtcaccatctcgcccatggacaggccctcaaccagcatgaactggccacgaatactcgcgcagataccgaactcatacggattaccgccatcacgcaccctgaaggacacgtcaaacgtgtccttcaatgattcaggcttcagatacggcatgagacacctccaacggcacggatagattgatggacatgaacgaaattcttgaatggctgtccgcagattggtggaatggcctcggagtgatcctggcaatcgtcggcgttcctagcctgttcgccggcattcggtatgtcgtgcgtaaagtccgccacacagacgacgaagagaccaaaccgatatccaacgagcagatagacgccatgttccccacaacaacgtcggcgactcccaagcctcccatgccgccaaaattcagaattgatatcaacgaaagcggggcgagtttcgtcctcaccaacatcggaggccctgcgcgtaacatctccgtgttcgccgaagcggtcgagggaacctacacgaacacatggaacaaccatcttggaagaaccgacagcaaaccatgggcgctgtccgacattcatttcttcaacattgaactgccgaaactgcgcgaggagcgacagcaaggcggcaccacattctttgacggacacgtggaggacggggacggcaaagcccattaccccatcaaattcatcatcgtctgggacggatgccctgaacccgtggagatcattaaaaccatcaactaacatccggggcctccgtaatccggcccgacagcgcttcgccaagctcgtcgcgcaacgcttcggcctcggaacgacccagaggaacaacgaggttccccacagaaccggcacgagagaactcgacgaagaacacatcagggcaatgcgccagacggctcacatgcaccgacacacgttccacgccagccatcacgagacctccagcggttcgcggcccaacagcacgtcggtagacacaccgaagtagtccgcaatgcgagacacgtcacggagcgtgaagttcgctcggccatgcaacttcgcattgagcaactggaaggatatgcctatcgaatcggccaaggctctctgtgtcacatgatgtgtcttcatcatctccctaagcctttcgcttatatcgcatgacgattggagtaaaaccatacgatagtcatatcgtataaatcgttacgatgtcaattcgacacgcataaattagtaaaaccacgttgtattattgaagtatgacagcagtaatgagccaaccggtatcggcggcaaaagcacaagatattgttgctatgaacgttaacctgatgatcaatgcgcggcacttgcagaagaaagacctagcaaaggctctgggcattgctccgcagaccatttccaagaagctgcgcagcgagataacttggacgatcaacgaaacccaggccgcggccgacttcctgcatacggatgtcgctactttgctgaatccgaatttgaccacgtcggagcttttggggataaacaaaaccgccgccccggatggctccgaagacggcggtcaaatggtagcggggcatggatttgaaccatggacctctgggttatgagcccagcgagctaccgagctgctccaccccgcgtcggcttgtcttttagacagctttatctacaataggggcaattttcaggaagtcaactcggcgtgttgtgctgaatcatggctgtgagcacgttctcctcggccgatcggttccagcaatcctctccgggagagggggccaacgagaaagacagtaatagcgcgctataaatggccgttataggaatgccggggagcgatatccaagaaattgacataatagagggcatgcctatcaagatccccagtggccttccggccagagacattctcgactcggagcgcatctttgcgctcgagaagcccgaggcggagcgtcagcgcgtccgcccgctcagactggtgattctgaacctcatgcccaagaagatcgaaaccgagacgcaattgctgcgtctgatctccaaatcgccgttgcaggtcgagatcgacttcatgaagacctccacgcatgaggccacgcatgtctccgctgaccatctggtcaagttctacgagaatcttgatgccttccgcgacaactactacgacggcttcgtggtgaccggtgctcccgtggagcacatgccgttcgaggacgtggactattgggacgagttcaagacgattcttgactgggcgtccacccatgtgttctccaccatgtatctgtgctggggtgccatgggcgcgctgtacgagcgttacggcatccataaggcggattacgccgaaaagatcttcggcgtattcccccagtatttgcaggatgagtactgcttcctgaccaacggttttgatgagattgcactgcagccgcactcgcgtctggccggcgtgaatgaggatgaggtgcgcgccaaccgcaatctgcagattctgacatggggtccgcagtcggggccagggctcatcgccacgcgcgacttctccgaggtgtttgcgctcggccactgggaatacggcaaatacacgcttgccgaagaatatgagcgcgatatggccaaggggctgaccaatgtgccgttcccgcagaactatttcccgcatgatgatccgaaactggagccgctgttcgcctggcgagcacatgcgaacctgctgtggcgcaactggttgaactgggtgtaccagaccacgccgtatgacctgaccgaggttccggggctgcgtgccgaaaagaagctcggcactgatcgttcgattcgccatgagcccggcggtccgcgcgaggatgatttcaagccgttcctcaacgacggctacggcgttattgagggctgatcgttcgcacagtggactgtaatctgttcacgatacggacgattgaatgaacataatcctacacatcggcgagatgcgactaatatcaaacaacactcgcgaagtgccgggaaaagccttacggcagtagggatgagaaaagacgcgccgaggtgggcttgactttgtctagacacaggcaaataatcactcttcagtcattcggagtcgaatgcccagcgctgactccgtgtccacactcggcagactccgcatcgagacgacgaaagtaacgagtccgtcacattcgcccgcccggtgggtttaaactgacacctgacattgaagaagcaggaggcgtgaatatggtcggttcgttcggcgcaggattgctgttggcgaacgagggcgctcatctgccctcagtcaacgacttcctacccccggagatcctgttccagggcactccgtttgccatcaaccgtattatcctgatccgcatcgtggccaccatcgtattgctgctggtgctcggtattaccgccaaacatgccaagctcatccccggtcgttggcagggtgtggtcgagtacggtcttgacttcgtgcgtgacaaggtcgtttatgacgtgatgggtgaggctcgtggcaagcgctacgtgccgatgattaccaccatcttcttcacgatctttgtcttcaacctgtgcggcatcatccctggtatgaacatggctgccactgccacggtggtcatgccgctcgtgttcgccgtctggacgttggtccagtactgggtcgccgccgtccgctcgcagggcctcggccactatctgcgacacgagctgttcacccccggtgtgccgtggccggtctacatcctgctggctccgatcaacctgcttgagttgttgatcatccgcccggcctctctgaccatccgtctgttcgccaacatggtttccggccaccttatggtcgccacctgcctggcgttcgcacagctctggatggttgacgcggccaacaagctgcagggcatcccggtgggtgcgctgtggttcgccggtggtttcgccatgacctgcttcgaggcgttcgtcgccttcctgcaagcctacgtcttcgcgattctttccaccgtgtacatcaacctgagcttcccggaagagtgacgggcgactaacccgccgcttccggtccccggtctgggaaaatcgcagaccgaccaaaccccaagatttataacgtcgccaagtacgttagaaaggaaacacaatggatatcatcaccctcgcagaggtcgccggcaacctgtccgtcatcggttacggtatcggtactcttggccctggcattggtctgggcatcctcttcggcaaggccatggaatccaccgctcgtcagcctgagatgtccggcaagatccagaccatcatgttcatcggcctggctctggtcgaggtgctggcactgatcggcttcgttaccgccctgatgttccactgatcgaacgttttctcagtcgaatacagaaggcaaaacgaatccaccagtgaaaggaggacttcataatgacgctcgcagaaggcggaattgatctgttcattcccgagacctatgacatcgtatggtcgctgatcattcttgtcatcgttgcggtgttcttctacaagttcttcatgccgaagttcaatgcgatcttcgacgagcgtgccgccaagattcgaggcaacatcgccaaggcggagcaggctaagaaggacgccgacgaggccaaggccaagtatgaggcccagctgagcaccgcccgtgtggacgccgccaagatccgcgacgacgcccgtgccgaagcgtctcacatcatcgccgacgcccgttcgcgcgccgagtccgatgcggcccagatcgccgcatccgcacagcgctcgatcgaatcccagcaccagcaggccatcgtctcgctcaagggcgaggtcggtgcgcttgccaccgctctggccggcaagatccttggcgccaagctggaagacaacgacgtgcagtcctcgatgatcgattcgatgatcgacgatctggccgtcaagaagtgaccgtgaccatccgtaaccagaaagggaggtgaccatgcgaggagaggcatcacgtattgcagaccgcgagtcgcgtgattcgctggccccgaaactgcgcgacacccgtgaggacgcgtggcggatcggcaacgaactgttcacgatcaccaaggtgctcgacgacagcatccagctcgaacgcgcattgaccgacccgtcccgcccggttgccgacaaggtggccgtgctgacggaactgctcggcgacaacgtgcatccgatgaccatggagatcatgaccgatttggtctcccgtcactggagccgtgcgcgggacatcgccaacgcggtggaggatttcggcgtggacgccatgatgtactatgcggacgccaccggcgccacgctgcaggtctccgtcgagctgtccgaactgcattccgcgttgctgaacctgtcggttgtgcgcgccaagctgtacgactaccaggccaccagcgaagcccgtgtgaagctgttccacgaggtgttctccggcaagaccctgaacaaggtcaccatgaggctcgccgagcacgccacctgcaacctgcgccgccgccgatacctggaaaccatccagtggctgatcaacaagctctcccgccatatgggcgaatcgatggtcaccgtgaccaccgccaccccgttgaagccggaacagatcaagcgactggtcgaggtctactccgccaaggtgggccgccaggtgcacatcaactcggtggtcgatccgaccgtgctgggtggtatgcgcattcaggtgggcgacgaagtcacggacaacaccgtggtcgcacagctgcagaaccttcatcgcaaggtgcagacggaggcgactccggcctgaccggccgatccaatccgtccaacaccacacacaagcaaagacttgactgaacaataaccaatagaaggagtgatcatggcagaactgaccatcgatcccgcctcgattcgcaaggccctcgacgacttcgtgtcgtcgtacaagccgagcgacacccccacccaagaggtgggatatgtcgccacggccggtgacggcattgcgcacgtgacgggattgcctggttgcatggccaatgagctgctgacgttcgaagacggcacgctcggcctggcgttcaaccttgacgcccgtgagatcggcgtggtgatcctcggcgatttcgctggaatcgaggaaggccaggaagtgcgccgcaccggcgaagtgctctccgtgcccgtcggcgacggctacctcggtcgcgtcgtggacccgctgggcaagccgatcgacggcctcggtgagattcagaacatcgaaggccggcgtatcctcgaagcccaggcccccgacgtgatgcaccgtcacccggtcgacgagccgctgtccaccggcctcaaggccatcgacgcgatgaccccgatcggccgcggccagcgccagctcatcatcggcgaccgccagaccggtaagaccgccattgcgatcgataccatcatcaaccagaaggccaactgggaatccggcgacccgaagaagcaggtccgctgcatctacgtggccatcggccagaagggctccaccatcgcctcggtgaagcagagcctggaagacgccggcgccatggagtacaccaccatcgtggcctccccggcagctgattccgctggcttcaagtacattgccccgtacaccggctcggccatcggccagcactggatgtacaacggcaagcacgtgctcatcgtcttcgacgatctgtccaagcaggcagaggcctatcgttcgatttccctgctgctgcgtcgtccgccggggcgtgaggcctacccgggcgatgtgttctacctgcactctcgtctgctcgaacgttgcgccaaggtctccgatgacctgggcggcggttcgatgacgggtctgccgatcgtcgagaccaaggcgaacgatgtgtccgcctacatcccgaccaacgtgatctccattaccgatggccagatcttcctgcagtccgatctgtttaacgccaaccagcgccccgccgtggacgtcggtatctcggtctctcgagtcggtggcgccgcacagaccaaggctctgaagaaggtctccggtaccttgaagatctccttggcgcagtaccgctcgctggaatccttcgccatgtttgcctccgatctggatgcggcatccaaggcccagctgacccgtggtgcccacttgaccgagctgttgaagcagccgcagttccacccgtattccatggagcaggaagtcgtgtctgtgtggaccggcacccacggcaagctcgatgacctcgagctgtccgacgtgcttccgttcgagcagggactgctggactacatcgaccacaacaccgacatcctgaagaccatccgcgagaccgaggacttcaccgccgataccgaggctgccctcgataaggccgtggacgaattccgttcgaccttcgtttcctccaacggcaagccgctggtcgagaagaagccggacgttgccaaggcagcgccggtcgatcaggaaaagatcgtggcgggagagaagtaagccatgggctcgcaactcgcattgaaatcacgcatccactccactgagtcgttggccaagatcttcaacgctcaggagatgatcgcgtcttcgcatatcgccaaggcccgtgatgtggccctgaacgcgaagccgtacactgatgcgattttcgatgccgtgcaagcgttggtggcacacacccatatcacgcatccgatcgcagtgaaggacgagaacaaccctcgcgtggctgttctcgccctcacctcggatcgtggcatggccggcccgtacacctcttcgattatccgtgaaacggaatcgctgctcgcccgccttgatgcggccggcaagcagccggagctgttcgtgtacggacgtcgcggttcgacgtactacaagtaccgcaaccgtgacatcgcggccacatgggaaggcgacaccgaccagcccggcgtggaaattgctgaaaccatctccagcacgttgatggatgcctacatgaagccggcggagcagggtggagtttccgaactctacatcgtctacaccgagttcatcaacatggtggtgcagaaggtgcgcgtgctgcgcatgctgcccgtcgagatcgtggagaacgaggccaaggtccccgctcctgatgaagaggctccggctgtggcggacgtggctccgctgtacaccttcgagccgagcatcgaggaagtgttggatgccattctgccgaagtacatccagtcccgtatccacgaatgcctgctgacagctgccgcatcggagaccgcaagcaggcagaacgccatgcacacggctaccgacaacgctcataacctgatcgatgaccttacccgcaagctcaacgcctcgcgtcaggcctcgattacccaggaacttaccgaaatcatcggcagcgccgacgcgctgaacaaagaggaagagtaggaacgcatatggctgacaaccagaccacagcggccgagcctaccgacggtcgcgtcacccgcgtccagggctcggttatcgacgttgaattcccggtgggtcatctgcccgacatctacaacgccctgaaagtaaagatcgtcaacaccggcgccaaggaagagggcgaggcaaaggtcactgaaatcacccttgaggtcgaacagcacctcggtgattccacggttcgttgcgttgctctgaagcctaccgacggcctggtccgtggcactttggtctccgacaccggagccccgatttccgtgccggtcggcgatgtgaccaagggccacgtcttcgacgtgtccggcaacatcctcaacaagaagccggatgaaaccatcaccgtcaccgagcgctggcctatccaccgcaacccgccggccttcgatcagctggagtccaagacccagatgttcgagacgggcatcaaggtcatcgacctgctgaccccgtacgtgcagggcggcaagatcggtctgttcggcggtgcaggtgtgggcaagaccgtgctgattcaggaaatgattcagcgcgtggcccagaaccacggcggtgtgtccgtgttcgccggcgttggtgagcgtacccgtgagggtaacgatttgatcggcgagatgggcgaggccggcgtgctcgagaagaccgcactggtcttcggccagatggatgagcagccgggtacccgtctgcgcgtgccgctgaccgcactgaccatggctgagtacttccgtgacgtgcagaaccaggacgtgctgctgttcatcgacaacatcttccgtttcacccaggccggttctgaggtgtccaccctgctgggtcgtatgccttccgccgtgggttaccagccgaacctggccgatgagatgggctccctgcaggagcgcatcacctcgacccgtggtcactcgatcacctcgctgcaggccatctacgtgcctgccgatgattacaccgacccggctccggccacgaccttcgcccacttggatgcgaccaccgagctttctcgtgacattgcctccaagggtatctacccggctgtggacccgctgagctccacctcgcgaatcctcgatccgcgttacgtgggccaggctcactacgactgtgccaaccgtgtcaaggcgatcctgcagcgtaacaaggaactgcaggacatcatcgccctgatcggtatcgacgagctcggcgaagaggacaagaccaccgtgaaccgtgctcgtaagatcgagcagttcctcggccagaacttctacgttgccgagaagttcaccggtcgccccggctcctacgtgccggccgacgagaccatcgaagccttcacccgcatctgcgacggcgtgtacgacgacgttccggagcaggcattttccggcatcggtggcatcgacgacctcgaagagaagtggcacaacatgcagaaggaactgggtgcgtgatggctgcggaaaaaaccacgatgaaggtcaacatcgtcgctgccgaccaccccgtgtggcatggcgacgcggcgagcgtgaccattcccgcctccgaaggcggcatgggcatcctgcccgaccatgagcctgtgctcacggtgatcaagcagggtacgctcaccgtggttgagcccgatggcgatcgccacatgttcgaggtgaccgacggattcatctccttcgactcaaacaaactcaccgtggcggtcgagcgtggccacgacgtccagtactccggcactgctgagtgacattcactctgctatgaccttgtaagggggctctctggtttccagagagccccctttgctatgtgttgcgctacagtggtggcctatgcgaattattgttgccgactgttctgcggagtactctggccgtctcaatgcctcgttgcctttggccaagcgtgtgttgctcattaaggccgattccagtctgttgattttctctgagctgggctcctataaaccgctcaactggatgaccgcaccttgcacgttgaaggacatcacgcccgatggcgccgatgatgatgcggatacgccggttccggaaaaagtgctgcgcgtgagcgccgacaaaggttcggacattctggaagtgacgttgcagcacatctattccgatgagacgtatgacttgggcgaagatccgggcctcatcaaggacggtgtggaagaccatctgcagcgatacttggccgagcagatcgaacgtatcggcaagggcgctaagttggtacgccgtgaatatccgaccgccatcggtccagtggacatcatggccatcaacgccgagggcgagcatgtggctgtggaaatcaagcgtcacggcggcatcgacggcgtcgaacagttgacccgctattgcgagctgctgaatcgcgacccgctattggccccggtgcacggcatcttcgccgcacagactattacgccgcaggcccaggtgttggccaaggatcgcggcttcacctgcctcatcctcgactacgacgatatgaaaggcaccgaggacgatagcctcaggctgttctgaatgcaaagttgcccccgctggcgggggctgtcgccgtgagtcgactggggatggtccccaacgtaaaccacccccagtcagcttttgctgacagcccccgccagcgggggcaacgctatttgctgagtgtttaatacgcggcgagaatatccactacgaataccagcgtggagttcgcgggaatcgagccttgcttcttgtcgccgtaagcctgatccggcggaaccaccagcagcacctgggatccgacggtctgaccaatcagacccttctgccagccttcgatcacaccgtgctggccgccggaatacatgtcagcctcaagtgtggtgttcttatcccaagaggagtcgaactgggtgccatcggtcagccaaccggtgtacttgaccaccacagtgtttttgtcggtcacttccttgccggtacccttgaccagtgtctgcgaaaccagcgaatcgaccgcaccttgaccgttcatgtcgatcgacggcttgccgttcttggcacgcgtcaccttcggcagattggacggcacgtccttgacctcttcgccggtggccttcttcagatccttggacttggaaacgaacgtcatcgccagaatgtaggagtagccggaagaatcctcggcgttcacaccgaaaccgatagtggtgttgagcttggcgcccttgatctggtcgtaataggtcgaagacagggtggaggaatcgaccaggagcgagcaatccggcgtatttttggtccacgtatccatcagctcggtgccgtccttgacattcagggcgataccctgggcgcagacgcggtcaccttcttcgattgtgtcgccgtcacccttctgcagcaccacgtaggagccgtcggacacggtcatcggggctttgaaggagatggtcggcttctcgcccagcttgcccttggcggttacgccggcaatctgattcgccgtcttggaagaggacgacttcgaggagtcgctcttggaatcggacgagttcgagcagccggccagcgagatgcacatgatcagcgagcaggcaacggctatggttttggtcagggtagacaaagtacgcatggcacaccacactaccggtaaaccctgattttcagcctttctaggtaatagacaggtgaagattgtagaatagtaccgttatgagtgttgaagaacaagcaatgggcccagatcaggaggccacggagtctgacgtagtcagtgacgtgaccgactcgacagatgtcatcgatgccaatgacgttgccgatgccgccgatggtactgatactgagagtgccgaaggtgtcgatgctgagagcaccgagagtatggaagacgccgagacgcaaaagtccgagcgcccgactcgtcatgccatgatcatgcgcggcgtggtaacgcctattttcggtctgctggctgtggcggcgattgtgctcggagtgctgaacgccacgatatggaagccttccagcgagatcaccgcatctgccaacgtgaccggttctcgctatgtggttaccgatcccggcgtgctcaccttgttggataagaacacgacgatgaccgtgaagtcctcctcgtccaaggatgagacatgcgtagccttggcctccaccaaggatgcagccggttgggtagcaagcgagaagtcctatcagcgcatcagcggtttgacttcttggaccgagctcggcgttcagaagggtgaacccatcaaaaaccaatcgggctcgtcggatgacgccaacgaggtggcattcaaagactccgatatgtggacttccgtgaagtgcggcaatggttcggtgacctttgatagcaaagatcctgccgcttcgaccgtggccatcatggatctcggctcacataaggcgtccgccactatcagcatgcactgggtgcgctctgaagttcccgatttcgccatgccgttctacctgtccggcggtctgctggcggtaatcgcggtgttgtgtgcgtccgtgttcgccatgccgccgcataagcgccgtaagcgcattgtggagggcaaggccactgcgtcaacggggccgtcgttcgcggaacaggttgaacagggaattattggcaacggctcgattccggctgaagtgccgccgaccggccgtaagcgtcgccgccatgccgcacaccgtcgcggttccaagaagaccgtgcccgccgagtcggtcggatctcccacgattatcgatcccgcgtcccgcaatttggtcgccgatcagcagtccggcgaagcgggggagaccgaggcgataacggataccgagtcgacatcagtgatttcttctgatgagttgcaggcatacttctcccgtttggctcaggaagtcaatgacagtgaagcctcggatagctccgcggccgatgatgtggacaaccaggaggagaactgatgagcatgcgttggaacaaactgtgcgtcgccgccctctccgttgccgcgctgattatgccgttggccgcttgcgaaggtcagctgcccaccccggccgctgactcatccaccaagactcagccggatttgaccgaggcgcaggagaagaagattcgtaccaagattttggaaacgattgatcaggccgacgcggctcgatccgcggacggctatcagtccgtgatgggcggtcctcagctggagattcgcaccagccaggccaccattgcccagaaaagcggctcgatgtccaagtatgcgaccattcctaaggacatcgcccaggtggtgattcccacggatgacggctggccgcgctcggtattcaccatcaccaccactaccgaagaccagcagtccaagcgtttattggtgctgaatcaggaatcagcccgtcagaattacaagctgatggccatggcgcgtctgtttgagggagcgcagctgccgaagttcgaggtgccgaccatcggttcgagaatgggtaccgataaggatgagaatctggtggccacgcctgccgatgcgttgacccagtatgccgatgtgctgcagaacggtgcgaatagcaagttcgcctcgcaattcgcggatgatcagctgcgtcagaagatcgccgaactgaccaacaccgtgcaggaaggcatcgcccgcaacaacggtacgcaggagcagaccttcactgccgcgcccgaccagatgtgggtgatgcgcacggctgatggtggcgatttggttgtgggtcgtgtcgattccgtgtggactcgtcaggccggtgacggacgcgaatcccagcccgcctccgatgatgagaagatcctgttcaacagcgacaagtacaccagcaccatgaaggtcacatacgtgaacgtggtggcgttgtacattccttcggccaactccggtcaacagatcaccgccgtgggtgccgaccgcactccggtcaaggtcgaggcgctgtaagttcccaccacgtagtaatttccccaccgcgatgtcagacgaattttgtctttcgcagaataacgctgttttgggtaaccacgtggtggtgattcactacgtggtgggaatttcaccgcgtagtggaagaatggctacgcggcgggaatcgacactacaatcgattccagcattgtttgattgtcgggcgtgcgaatcgtgcgcgtacatgtggaggcatatatggctgatcagcagcagttcaatccaggagtatcgttggcgggtgctgtcgatttggaagcgctgaagcatcaggtcaaggctgagccaggacaggctggcggcgcaccggcagctggtggctatgtgatcgacaccaccgagaacaccttccaggcgatggtgcagacctccgccacgttcccgattctgctgttgctgtgggtgcccactgacgaccgtcttttctcgatggctcgcgcgctgggcgatgcggtgaatggtctcaatggccagattcagctctcccgcattgacatcgcgactaatccttcgatcgcacaggcactgcaagtgcaaggtgcgccggccttgtttgcgctgatttccggtcgcccgatgccgttgctacagggtctgccgggtgatgatgagctgaagcagctcaccgacgaagtgattcccaagattattcaggccgctgcccagtccggcgtcaacggcactgcgccgtattccggcgatcctgattccgatgctgccgcgagtaccggtgcgactggtgctgatacggagcaggtgcctcccgagcacgctgaggctcatcgcttagccgaggaaggcgactacgccggtgccgccgctgaatatgcacgtgttatggaatccgatccgtctgatgcactggccgcccgcgaacatgccaaggcgcttttgctggcccgttccggttccgcggatgtgcgcgaggtgcgtgccgccgcagccgctgcgcccgacgatgtggaagcgcaactggccgtggctgatatcgatatgattggcggccagatccaggatgcttttgaccgtctgcttgacttcttggccgcaggccataagggcgatctcgaggcggtgcgtcagcgcctgctcgagtacttcaccatccccgagccgaccgacccacgcctagctcgtgcccgtcgccgtctcgcaaccctgatgtactgattttccttggcttccctcgggtgaggccgagccgtgaagcaaacagcccagtgggctgtttgtaggcgagggcgagacgatagtcgagccagaaagctgcggggcaaagcccgtccttaattgcggctgagctggctgttacgccatccggtttttcccgaaatactgctggaaccgtggcccgtccaaagccagctcctcttcaaagtcgtcggcccatgtgctgaacggcttggcagccagtccgtcattgttgaatcgcgcctgatcggtgatttcggtaacgcagaacttcggaatcgtcagattggttactggtcccgatcgttcggcctcggccacgataagaggcgcattgagcccgccaaacacatccacactccagccgtcctccgcaatccatacggaatagcggttcttgataaccacttcgccgccgcgcttgatgagttccgcggcaatgcgggcgtcaatctcacgctccacttcatatcgggtgccgcccacggacggtcccttaacggtaacgaaggcctccgagaactgctcgcggtgctcatccagcacggcaatcgggtcgatgtcaggggtcatattgacgctcaccttgtgtgagaccaacctgacgcgcagcgcatagttgtcggcatgcacgtagtagctctggatgatgagggccgggatgtcgccgtcgttgtattcgtctggcagctcgcggcagaagaagcggcgttcgtattcgaagtcatctgtaggttccgacataaccccattgtagagccgtttacggcgtttccctaggttttgccggtgattggcctcacaatatggtcatgatgccggctgggctgcgctgttcgatgatagtggcttggcgcgggcgatggttggtgtacagtaaaggagttgctcgggtttgtagctcagtggatagagcgtctgtctccggaacagaaggtcgtgggttcgatccccatcaagcccaccagtggggctttcggcatgtgtcgaaagcccttttttcatgctcgctcagggttccctgagttttccctgagggcatccatgaataccccatggaatgctgttgtgttgggttttaagaacgcataatgaagtggattgaggtcgtggaactcaccccatgaggaggtgtgcgatgatccggaacgggtcgcagcggcattggtcggttcacttgctcgctatggtactggcgctgtctctggtgacgggattcgcggttacggcgggcctgcgtgtgcgccgcaaggaacagccgttctggcatatgggtgaagcatcccggaagcgctctgctgcatatcgcccgggcggtgaggcggaatatggccgcatggcgggcagtggcatccgtaagcgtgcctgcgctcggtaaactgctacgtaatcgggttcgctaatccaacaagaggagcacataatgagcgagaagatggaagccgtagctacttcggaggccccggccgcgctgggcgcgtacagccaggcggtgaaggccaatggtttcgtgttcgtgtccggtcagctgggtattgatccgaccaccggtgagctggcaggggataccgcgggcgagcaggccgcgcaggcgctgaagaacatcaagcatattctcgacaccgccggtactggcattgagcatgtgtgtcgtgccaccatttacctgaagaacgttgaggatttcaaggaagtggacgctcgctacgccgaggtgttcatcggttccgtgaagcccgcacgtgtggcctttggcaacaacatgattcccaagggtgcactggtggagatcgacgccatcgccgtggagtgacgtatttgcccccgctggcgggggctgcccggcaatggtcggacggagggggtggttttggctgtgagctgagaccacccccagtcagatgtgctgacggcatccaccagcggggctggtaatgcatggtttgggcgtcggttcgtgccacaatagtgaccatggcatccaaaggaaaaccgtcgccgcgttcggctgtgagcccgctgagcgacgaacaggtcaagcgtctggcaggcagccatacacttgtggaccccaccaattactatccgactggtccgcgcacgccgaaccagccagagatcaacgcccagaaccccaaggccaccaagcgactgctggccggtgtttccgtggtattccgcgctagttgcaagaccaaggcatggggtcttgaccatgtgccggaaaccggcccgttcattaccgcggccagccacatcaccatgttcgatgtgttcgtgccgatgatgagcctgttccacatgggccgtcgcccgcgttacatggccaaggccgagatggccaagtggccgctgatcggcaaatggttccaattggtcggcatgcagccggtgcagcgtcgctccggcaaggccaagcagatcgaggagacctcaatcgatattcttacttccggccgccccctcactgtttggccggaaggcacggtgacccgcgacccgaagaaatgggtgatgagcatcaaggagggtgtaggatacattgcgcttgaagcctcccgcagacttggccatcaagtgccgctctaccctgcagtgacgtggggcgcggcttccatcaaccactggtggccgtggcctcgcaagaatgtggtgatgtgctacgacgaggcgctcgattattccgatctgcttgttgacatggattcctggggcgatgaaccgcccgccgaggccgtggacgaattgatgtggcgcgtattcaagcgcatgaacacggtgttggaggagattcgcggcgagcgattcccggcagaaggctattgggattaccgttccatgagccgtaagtcgtggcccgaggctggtggccagttcccggcggtggagtagcataacgcgcagttgcgcgcagcgaaaataggaatttgatatgggtaggaaaataacggttctcggtgcaggagtatggacggagccgtaaaggcgacagcccggtgggctgtcggtaggcgacgccgaacgacgatagccgtgaggtagaaaaacagcactccatgcgacaagcgaaggtaggaatttgatatgggtaggaaaataacggttctcggtgcaggagcatggggtactgctttcggccaggtgctggcggatgccggcaatgacgtgaccatgtgggcccgtgaaccggaaatcgtcgaggatatccgggacaatcggcgcaatggtgttcgcctgccgtctgtcaagaagctgccggatgccatcaccgccactggcaatcgcgccgaagccgtcaaggatgccgatattgtggtcgtggccatcgccgcccagttcgctcgtgtggcactcgttgagttcaggggattgattcccgagcatgccattgtggtcagcctgatgaagggcatcgagcgtaacaccaacaagcgcatggatgaagtggttcgtgagacccttgatttgccggctgaccgctttgccgccatctccggcccgaacctgtccaaggaaatcgccgatcgtcatcccgcagccaccgtggtggcctgcgagaacatcgacaacgccaccatcgtggccgaggcctgcaccaccaaatacttcaaggcgttcgtgaccactgatgtcattggtctggaaatgtgcggcagcctgaagaacgtgaccgcgctcgccgtgggtatggctcgtggtgccggttacggtgagaacaccgccgccatgatcgagacccgcggacttgccgagctcgctgctctgggtgctgcggcaggcgccgatcccaagaccttctttgggctggcgggtgtgggcgatctcatcgccacctgtggctcgccgctttcccgcaactacacgtttggctccaacctcggcaaggggctgagcgtggaagaagccactaaggtcagcaatggcgtggcggagggtgtgcctaccacggatgcggtggtggctttgggcaatcagcttgacgtgcccactccgttggcctatcagatgagccgtgtgctcaatgaaggcattccctgtgcggaaatgcttgccgggcttttcgggcgtgaaatcactgtcgagtagactcatagcagattagaagtttcgttcagcagtcaaaggatggttatggccaagaaacgtattgtggtgctctatggtgggcgtgcggatgaacattcgatttcctgcatctccacggccggcgtgctggcggctatggataccgaacgtttcgagccgattccggtgggcatcaccaaggacggcaagtggattatcgacggtgaggatccgcgcggctggaatctggacggcgacgagctgccgaccgtgaagatcacgccggaatcccgtccggtgattctcgacccctcgcgaggcaaggacggtttctttgccggtgagccggatcatctcagcaatgccgactccggttttggcaccagctttgtgagcttgtccgatcctgagatacatcacgtgctgacctcgctggggcatgtcgatgcggtgctgcctgtgctgcatggcccttacggcgaggacggcacggtgcagggtcttcttgagatgatgggtgtgccgtatgtgggctgtggcgtgttcgcctctgccgcctgcatggataagcactacaccaaagtggtgctcaatgctgccggtattccgacggctcccggcattatggtggatgcgcgcgcgttcactgcagccgatgtggtcgcccagatcgaggtcgccggattggcttatccgctgttcgtcaagccttcccgtgctggatccagctttggcgtcaccaaggtggataaagccgaggatctggaaacccagcaggaccgtgtggccgctgccatcgccacggccggtgagcatgactggaaggtgctcatcgagcagggcatcgacggccgcgagatcgaatgcgccgtgctgtgcccgaaggcgggcgatgagcccgaggccagctggcccggcgaaatcgtgcttgaccaccagaatgacgaccagttctatgatttcgattccaagtacatggatgcttccgccagccatgtggaagtgccggccaacctgcccgtcagcgtgcttgaggatgtacgcgacgtggctcgccgtgcgttcaaggccgtagatggagcgggtctgagccgcgtggataccttcgtgactccggacggcaccgtgatggtcaacgagatcaacaccatgcctggcttcacgccgatttccatgtatcccaaggcgtgggacgccacgggtgtgggatacaccgaactcatcacccgtctgatcgaaggcgtgttgaagtaatctcgcaacagcgactgcgtggcttccctccttgggaagccatttttttgacgtatggccgtcgagcgtcaacagttcatgccgagttttcctgagttcagccaacgtatggcaaatggcgaatgcaattcactttcacgccagtgtccggacagattggacgcatagtttcttttcttgggattacgggctgcgcgcatgccgcgcaacgagcccggttcccccagacttttccgtctggatgatgttgagaaaaggaacattatgaataacctgagtaagatcgcggccggctcccttgccgccgtgcttgcattctccatggccgcctgcggctccagcagcgcctcctccgatggcgccggcgaaagcgccggcaaggccgtcaccgtgaacgggaagtccgccaaggccacttccctcgccgacttcggtactatggaagacctcgaaaaggccgccaaggaagagggtgcgctgaacgtcatcgcgctgccgcacgactggtccaactacggcgaggtcatcgagggctttaagaagaagtacccggagatcaaggtcaccgagctcaacccgaacgcttcctccaaggaagagcttgacgccgccaagaccaacaagggcaccgacgccgcccccgacgtgttcgatgtcggccaggccatcgccgccacttccaccgatagcttcgctccgtacaaggtgcaggcctgggacaagattccggacaccgccaaggatgccgacggcgcctactacgccgactacaccggcatcatgtccgtgggctggaatgccgataagtacggtgagatcaactctctggacgatttgctcgattccaagttcgccggcacggtgtccttgaacggcaagcccaccgaagccggtgccgccttcaacggctacctgatggtcaaccagctcgcaggcggcgacatcaataacctgcagcctggtcttgacttcttcaagaagctgcaggaagccggcaacctgaccaccgtggacgtgaccaacggcaccatcgactccggacagaccggtgtggtgttcgactggacctacaatcaggcttcatacaagaaggagctcaaggataagggcgtgaactggaagtacaagaccttcccgaaggcccaggtcgtgagctactacaaccaggccatcaacaaggacgcgccgcacccggccgccgcccgcctgtgggaggagtacctgtacaccgccgatgcccagaacctgtggttcaagggcggcgccaacccggtgctgctcgactccatgaaggaagacggcaccgttgatcaggacaccctgaaggacgccatcaccatcgaaggcgacccggtctcctacatcaacgatgactccacccgcatcaccgagtggctccagaacaactgggacaagacgatcggcaactgaggttacctcgcatgactgccgcaatcgcacagaacggacctgctgccgccaaggccgcgggtccgtccgctactccctccgccgcttcgttcgtgctggcgaagcatcgtcaggagctgggcacgcttgcctccacgctcccgttctttgcctataccgcctgcttcctgctggctcccaccgtgattgtggtggtgggtgctttccaggatcgcagcggcggtttcacgctctcgaatttcaacaagatgttcgaagccaacaccgtcgccgcattcggcacctcgattctggtgtccgtggcatcttccgtgatcggtgcggtggtgggtgcgctcgcctcctacgcgctggtcatcggcgccaaaccgaacggtctgctgcgtcgcatgatctccgccatctcctcggtgctcgcccagttcggcggtgtgatgcttgcgttcgcgttcatcgccaccatcggcattaacggcatcggcaccatgctcatcaagactctgaccggctacaccgtgaacccgaactggctgagctcgctgcccggtctgatcaccatctactgctactttcagattccgctgatgattatcatcttcctgcccgcagtcgattcgattcgcccgcagtggcgtgaggcctgcgaatcattgggcggcaatacgttccagtactggactcgcgtggcctgtccgattctggctccccgcttcatctccgcgttcctgctgctgttcgcttccgcgttctccgcatacgccactgccgcagccttgttctcgcagcgctcgattctggtgccgttgatgattcagggtgccatgcgtaatgagatggatcctaaccagcagggctttgcccaagtgctggcattcgcaatgatcatcgtcgtggccatcgtcatgctgctgagccacgctgtggaaaagagggccggacgttggcagtgaatgcagaagatactcgcgcgttcgatgctgacggcatcgccggtgctgtcgtcgcgtccaccgtaacgttccccaagcccccgcagctgcgcgccgcacgccgagccaagcaaagcgtcatcaaattcgtgattttgttcgtcacgctggcgttcctgttcgtgccgttgctggccatgctcatcttcaccctgcgtcatccgctctccggccgctggtcggcggctccctggattgcgatcttcaccggcaacggcgaatcgttgggtgctgacctgactgtgctgtggcagggtgtcggcacgtcgctggcgctgagcgcggtcactgtggtgatcatgctgttgctgctggtgcccaccatggtcatcgtgcatattcgctccaaagccctggaacgcgcaatcgaatgggtggccaccttgccgctgaccatcccggccatcgtgctggtcgtcggccttggcccgatctaccgctggctttcggccgacgtgctgagcaccaacccgatttggctgtgcttcgcctatgtaattctcgtcatgccgttcgcgttccgcgccatcgccgtggggctcaactccatcgatgtcaagaccctggtcgaggcctcccgttcgctcggcgcctcctggcccaaggtgttcttcaaggtgattatcccgaacctgtggcagtcgattctgtcggcatccttcatctccatcgccgtggtgctgggcgaatacaccgtcgcctcgctgctcggccgcatgaacctgcaggtcgcgctctaccagctcggccagtccaattcacaaatctccaccgccatgtcgctgctggctctgctcttcggcgtggtgctgctcgttgcgctcgacttgatttctgatgcgatgcgcaagtccaaagaaggtaaatgattatgtctttccgttcgatgtttggccatgaggcttcgcatgaggccgttgccgatgtggctccgactgtcggcaccggctccgatgtgcagcccgtcgcctccgcgacttccacgcaaactgccgccgaggatgcgttcaagaacgatcccaccgctaccctcgagggcgtgcgcggcaaggacgtgaccaaggccgccaaggctctgctcaaggacaccgtcaagcgcggcggtggctccattcagatgcagaacgtcatcaagatctaccccggctctactgtgcatgcgcttgacgatttcaatctggacatcaagcccggcgaaatggtcgtgctgctcggcggctcaggctgcggcaagtccaccgcgctgcgctcgcttgccggcctcgaggatattcagggcggccgcatcatggtcggcggccaggatgtcaccggcgtgccggtcaacaagcgagagatggccatggtgttccaggcttactccctcttccctcacatgaccgctctcgaaaacgtggaattcggtcttgaagtgcgtggcatgggcaaggccgagcgtcgcaagattgccatggagcagcttgagctcgtggggcttgccgatcaggccaagaagtacacacagcagatgtccggcggccagcagcagcgtgtggccttggctcgtgcattggcagtcaagccgcgcgtgctgctgctcgacgagccactttccgccctcgacgccaaggttcgtgtgcagctgcgtgatcagattcgccgcattcagctcaacaccggcaccaccaccgtgttcgtgacccacgatcaggaggaagcgttggctgtggctgatcgtatcggcgtgatgaacaagggcaagatcgagcagatcgccgctccgcaggatctctaccagcgccctgccactgagtatgtggccacgttcattggtttgactaaccgcctgcccggagcgtccaatggcgacgaggccgtggtcttcggccagcgtgtgccgctgctcgaagggtcggccaagggtgattccgtggccgtgctggtgcgcccggagaacctgactctgaccgcggctgcacagcatgactcccacgtgggtgagcgtgcgcgcgttgaggtcatccacttcctcggctccttggtgcgcgtggatacggtgatcgcctccggcgaataccagcgctggaacaagggcgagcagctcaaggtcacggtgcagttgccggccagcgagttgccggctgggctcgccgtcggcgatgaggtagtcgtggctcctcgcgcggtcgcagcgctcgcttgctgagcctcgatgggggaatcagccggcagcgtatgatagcgaaaattcactgtcggccatagctgccgatgtgtgatggtgtgggacaacataaaataatcgctgttttttgcatgttgtcccactgaatttgggacaacatgcatgtcaaacgttatacatgtgtgttgtcccattgtgtttgttagaaaatcgttgcaatgacgccatttcaccgctacggccacatggtgcggtttgaggagcgtgggacgatacgcaaaaacagcctatttttgcatgttgtcccacgcgaaatggctattgccgcacaattcccgactggtatgcctctcggttttagcgcggttttgaacatactgccgtattcttgaagcgtgtgcataggcggtcctcggaccggtaataggggggaatccatgagcaaaccgcagacgccgcaaaccgagcagggaactcaaacaacgttgccgcagcagtcgggtaactggtggtttgtggcatatcgacgcttttcgatagtgggcgtggcgctcgcgattatggtggcgttttggattgggctcaacatgctggccaccggtgcattacatcagtttgccggtaacgatgtgcctacgtgggcggtgttgctggcctcctcgggcccgctgtatctggtggccatgccgctcagcatgctggtgttcacgcgcgtgcccgccatcagcacccgccaatttgccatgaagccgggcgaattcatcccgcttttcatcatatgcattcctgtgatgtacctcggcaatatcatcggcatggtgctgtctgctggtgttaccgacggccaggccacgaatcgcatcaatgatctggtgctcggcggcaatgagtgggtgaatgcactgtttgtgggactgctggcgccgatttgcgaggaatggcttttccgcaagcagatcatctcccgtctgcgcaggtacggggaaaagacggctatcgtgttctccgcactggcattcgcgctgttccacatgaatctgttccagttcttctatgccttcggtctaggcctgattttcggctatgtgtacacgcgcacctctcgcctgcgttactcggtgctgatgcacatgctgatcaacctcaatggctccgtgctggcgccgctgatgctcaagcagattgatcccagaatcctcagcggcaccatcagtgaagccgaaatcatgagcatggtgcaaggcggcagcggtatgcgcggattgagcatcatgatgctgtacggcatggtgatgctgggtctcctgattgccggtatcgtgctgctgattgtcaagcgcaggaactgggaattctatctggctcccgaagagttgcctaccggtttgaaagtgcgcacgacctacggcaatccaggtgtggtcatctatatactgctgaccgttggcctgactatctggatgctattggcgtaagcattttttggcgcccctctttgaggggagctgtcagcaaagccgactgaggggagtctccgcggtatcacggtactcccctcagtctcacttcgtctggcagctcccctcagagagggaagccaagatggttagatgttgtctgctgagccgccgtcttcgacaagataatcggctccggcgatggcgcgcgcggcggtatccgtcacagtggacagcagcacgccttcgcgtgcgaataccagtacttggccggtcatgccgtaaggcgagaagccggtgaatttgaccagaggcggctgcccttccaaagacacattggcggtcgccttggtcacacggtcgaggatatcctgactgacagcggccggatcgctggacgctttggcggtgaattccagcgtcgacatgccctcactcaccggcgtcaacttggtcagcgctgcggtattcagcaccgagttgggaatgatcatcaaatcaccgttgcgggtgcgcaccgcggtctgccgccaggtgatgtcatgcacagtgccggtgacgccttgaacggtcaccaaatctccgggctggatcacgtgtcctagcatcaatccgaatccgccgatgatgttggcaacggtatctttcagacccagtgaaatcgccacgcctccaacgccgagggcggtgatcagtgtggtgggattaatgccgaatactggttgcagcaccattgccgcgccggtgacccaaatcgttacacgcgcgaggttcacgaaaatcgaggcactgggaatctgcgaattatccaataccttgcgcagaacgcgactgacaagccggtcggtcaccagcacgaggaccaatacaatggccaaccacgtgagtttgccggcgttcgcttggaaccagcgatcaatatttcctgcatattcatccatatgccttactgtatcggccatctctgaagaagttgtgagagacccctcagcagaggaagtatatacggattgcctccctctgacgaggaacgtggctgccggaggcggtcggagggggagaccagtgcggaagatcagttatgctgccagcagcgtcacgccggtcatggtccaattcctctattcctgatgctcgcggcaggtttgcccgaggccgcgtgccaggcgaatcgggtcgagaatctcatccagctgttcggcgggcaagtcggtgcgctcaccggccacttcgcgcacggtgcggccggtatgcacggcttcggcggcgatgtcggccgcatgctcatagccaatatagtgattgagcgcggcggaaatcgacggcgaggactgagcgtaggcgcgcccgttatctgcgttgatttcaatgccttccacgcagttgacgcggaacgtcgtcatcgcgttggtcagtagcgccatgccggtgagcagctcatgcaccatcaccgggtcaaaggcattgagctgcagctgaccttcggccacggcccagttcacggtcacgtccatgccgaaaatcatgaagcagcattggttgacgcattcgggaataaccgggttcaccttggctggcataatcgaggaccctgcctggcgtgccggcacattgagatcgttgaacccgcagcgagggccggagttcagcagtcgcagatcatcggcggccttcttcagatgcacggcgaggttctttacggctgcggatgtagacacatacgcgcccatatcggtcatggcagccaccggatcaggggcggcggtaaccggcagacccgtgatttgcgccagatgcttggtggcggactggcggaagcgcaaatcggcgcaaataccggtgccgatagcggtggcgccgaggttgagctgggccaacaatggcactacgcggtcgaacgcggccaaatcggacttcagcagtgtggcgaatgcgtggaattcctggccgtaggtcattggcacggcgtcttgcagctgggtgcggccgattgtcacatcattgatgtgcttgtcggccaaatcatggaaggccttggcgagtttcttggtggactcggcaagcggtcccagcgcgtcaatcagtgcgagcttgcaggcggccggataggtgtcattggtggattgcgattcgttgacatcgtcgttcgggtgaatgtatgagtagtcgccacgctgatggccggcgatttctagcgcgcggttggcgattacctcgttcatgttcatgttcgacgaagtaccggcgccgccctgcataacatcgaccgggaactgatcggccagcttgccggcctcgatttccaggcaggcagcacggatggcctcggccttggaaacgtcgatgagtcccagttcctcgttggcgatggcgcaagcgcgcttgactgtggcgtaggcgcgaaccagctccggatgctggctgtcggtgatgccggagaccgggaagttgctgatggcgcgctgggtgtgaatgccccagtaggcgtttgccggcacttccatcttgccgatgcagtcgtgttccaaacgggtgttgttcgaagtttcgctcatgttttctatcttcctgtgcgtgaggtggaaacgccagcattgtgcggcgattgcgccttgtgagaaacctcacgcgggtttatgcaaagagccacgcctgttgcggcggagctcttcgttggaggattggattagggtgtgtttacactagttgggttttggctgtgttttttcaggtagacggcgatgaggatgagctggaggttggcgaggaaggtctcgtcgagcctgtcgtagcgggtgacggccttgcggtggtgcttcatgcggttgaagacgcgttcgaccatgttccgccctccccgggagacgccgacggaccgggagccctctttttcggcgccccggccgcgtgccggtggacctgtggaatctgctgcggcatggcttcgcgccttcgtttccagtcgcgatttgttttgtttggcgacagaaaatcgtacacaggacacgggccatgcccctatctcaagcccagaccaaagtacgcaaaatttcgggcgttgtcccactgttccccatttatggaatcgtaatttactaaatcatgattccatagaccgaacgatggctgtattcatcttcgagggcggttgaaaccgcgtcgacacgccgaaggggggctcgcagaaccatggttgctgaaaggcagccattggaattccgccattgtgcgaaacctatccgccgttctgcgagcactccttcggcgtgtcgttaggcgagcatttcgataagtgtggaaatcatcgtgtacgtcgccacgatgaacagcaatcctgcgaacaatcgcgtcaatacgacttcccgcatcctgcgtgacgccggagctccgaccagtcctccaatcattgaggccaatgcgaagacgatcacgattccccagtcgatgctgacgctggtcccaatgcgcgacatcaggccggccgccgatgcgataatcatcaccagcagcgatgtcgaggaggcctcgcgcatggtgaaccccaaagccagcaccagcatcggcactacggcaaaacctccgccgacgccgaaaaacccggttaatgcgccggtcgccgtcgcgcatgccaccagcagccaaacggaccgatgcgggttgggggaaccggaatcggcatgcgcgacggttccggcgtcaccgacttgactcatacggcaggatttacgcaccataaacacgccaaccgccatcaacagcacgctgaacagtatcatcagcatatgcgcgtccaccatcagggatgcgcgcgaccccaacacgttgccgaccgaagacaccacgccgaacaccaaaccgtctcgccaacgcacatgcccttcgcgggcgcgaggcatcagcgataccaccgcggtcaatccgacgatcaccaaggagccggccgacgcggcatgaggctcctgtcccagcagatacaccagcaccggcacggatagaatgccgccgccggcgcctagcgcccccacgacgatgccgacaccgaagccgactatcaatgccagaaagagatgagtcatcgataccaaccttccgaggaataaaacggcatgtgcaataggggggggcagccggcagcggcaagccgaatgaaggagtattacggcagggctccgccgaccctcacacgactgcgaatgcgcggatccatgatttcggatgcggcatggccggaacgaatcaggcgggccatgcctatgatgtccgggcggatatgctcatagaacagtgaatagcccgcgcagaggtagttctgtccgttttgcccatccttggatttcaggaaacggtctttcgggcagccgccgttgcacatgcgcacatacgggcatcggtgacactgatcggtcagttccgcatgttttttcaatccaaaacgttgcatgcgcgctgattgcgacaaggtgaagaaatcggcgttggccacattgccgatcagccaatcgggttccacccaatgatcgcacgcatatacatcgccattgaattccaacgcgaaattgtatccgcattccggggcgtgtacgcatacggcgtattgtccgaatagcgagcccagcgcgccgtcgaaatcctggacgaatacccgaccgacatcatgcgctatccattcgtcgaatacatcgcataaaaaccgtccgtatgctttcgacgacgtggaacgggatgtgacctgttcgccggtttgacgatacagcagaccggcgcgttcgcctcgcgtcccggtgattcgccagccgttgcgctccacccgttccagttgcgaggaatccacccgttcgacgatcggaatgaactgcatgaaatcggcgcccaattcgtcgcgaaaatatcggtatacctccgaaccccgtgtttcgttcgcatgatgcaccgtgcagaggatattgcagcgcactcccgcgtcgtgcagtaatcgccaacctcgcacagccattgcatgcgtgcctttgccaccacgattcaatcgataggcgtcatggcagtcctgcgggccgtcgattgatacgcccgccagcacatcatgttcacgaagaaaggcgacccattcgtcgtcgatcagggtgccgttggtctgcaaggcatgtttcacgagttgtttcttgcgccggtatcgttcgcataggctgacggcggttctgaagaaatcgatgccacgcaaggtgggttctccgccctgccacagcatcgtcacctcgccatcgggacttgccgccaggaactggcgaatgtacgattccagcacctcttcgctcatcatctgacgggccgaatcgtagagcaattccttcgagaggaaaaaacagtattggcagtcaagattgcaggccgcgcctgtcggcttggctatcacggtaaaggggaggcgaggccgcctcatcgtatcgttcatcaaaacgcgccttatgtagtggttgcacaaagagtctccgaatgctcctgatggcacttgtcttcagcgccgtcagacattgcctgccgccgtggattcccgtgcacgcagaatcgtgccgacggtcactttttgcggaagcgtttccacgtcgggatgttcgatgcgtctgcgcaacaaggaaacgacggcggacgccatgccgggcaggtcgacttcgacggtgcttagagtaggggtgctgatggcactgtggcgaataccgttgaagccgatgattttcacctgctccggcacccggactccggcttcatgcaatccgtgaagcatgcctaatgcgatttcgtcgtccaagcagaacaagccgtcatatggcattccggcttccatgaagaggttcgctgcgcgaatgccttcgtcagaattccacccgacatcgatcaaccgttcattcacgatggattcgcggttttcgtgatacaggtcggccaaggcatccatcgcggcatgcatacgcaatccttggagtgtcagtacggaagagccttccgggatatcggcctccttgtcgtcggtcatgccgccgacgatgccgatggacgtgcagccctgctggcgtaagtgttggatcgcgctgttcacaccttcggaattcggggatttcaccctgtcatatcgcgtggtttgtgtgaaatcgccgagaatcacagcaggtttatccccgatcagcatggataggtcttcatcggcgtaatgcgcgaccggcgcgacgaaaaacccatcggccaacgaggagagcgcggaaccgatgatgctgttctcctcggatgccgaatgctgggactgctgcaccaccagttgcatgccggccgaagtggcttcccgggccaactccacggaaagcatcgaataataggtgggggaaagatccggcacgacgaatgagataagaccgctgtgatttgaccggagcattcgcgcggagagattcgtgttgtaatgcaatgcctgtgctgcggccagaacctttttcctggtgcgtggagaaacgttcggaagcccgcgcagcgccgctgagcatgtggtgtgggacacgcccgcctgacgtgccacgtctttgagcgtcgttgccatatcatccctttctttccgccaagttcgcctcggatgctgaacgaaccgctatctcaaatgtagaccatggacgtacatgtgcttgtcatcgtagccgcgacgtaagggcacgagttgtccccatccctggatgtcatgcgcccaggcgctgtccgccgcggtttcatgatgggcgaaccactctcgcagacggtcgtgcaattcgttttgcatatgcgcatgggtggcggtgccgtacaggttctcccgttcctcaggatcgttgccgagatgataaagctcgccggggccgtcatagcgttcgatcagcttgtaatcgccgctgcgtaccatgcgtccgccgccgtactcatcgaacaccatcaccgattcgcgtttggcgtcatcgactccgcttctcgccagattcgcgaatgacgaaccggcgcgtaacggatcgtcggccggatcaactccggcgagttcgcagatagtggacatgaacccggtcgccgatacatgatcgctcacctcgcgtgcttcggtttggccgggaaggcggatgatgaagggaaccctcacggaattctcccagaaattcaacggataggtgccatttcccttgccccagatgccgtgatgtccgcaactgaaaccgttatccgccatatacacgataaccgtgtcggaggcgagatcatgctcgtcgagtttgtcgagtagcagacgcagtgcacggtccacgccggaaagggacgccgcgtatccgcgcagttgcggtacgggatcgtcgaacgcctcatagaattccgtgcgaggtttggaccacggatgcggcggctcccggggaaccgatgcgaaatcgcatccgctgtacaggtcgcagagttcctgaggatggcttcccacccatgggtggtgcggagccgtgaaattcacctgcatatagaacggggagttcgatgtcgttcttcccgcgacattgcctgacgcatagtcgtcgaggaagcgacaggcctcatcggccactgcatcggtgaaatatcgcggttcgtcgcgtttgttgccgtggtcgtcccagatgggcgcgtcgaaatacgggccgccgcctttgcgatgcgcataccagaaatcaaatcccggtgccggtcgacgtgacgtccccacatgccatttgccgctcattgcgcaaacgtatccggcttcgtgcagtacctccggcagggtaagcaatccgccgagatactcctcctcgtgcgggtcgggctgctcttcacccggaatgagccagtcgtgcacgccgtgtgcggatggcatgcgcccggtcagcaatgatgcccgggcaggtgaacagacgggcgaggcgcaatagaaattatcgaagatcgtgcccgtctttaccagctcatcgacggtgggcgtgaccagttcgggcatggtccgggtcagcgcccaggggccttgatcgtcggtcatgacgacgaggaagttggggcgcgacgtgccggtttccgtgtcgctgcgcgaatcgtgggtcatgtctgatgacacgatagctccttttccataggttcgcgggttgggaatccggtgtgatgacgcccccgcggtgccgatttcagctccttcgtactatagcataaatcttaacgttaaaccatcgtgagtgtcgtcttctactgcgaatgtggcggggatggcgatgaggaacagcgctatggcggcaagggggtcgcgtggtgtccacagttggcaacgacagattcacgtatttcgatgagatgcccagaaatggcatatttctgggctttatgaaaggtgatattactcggaaatcatccgtgaatcacgaaatgcgtaccctatggttccgtattcttccatccatattgacgcaatcgccgtgtggcgcgccggagggggctgggttttgatttcggcgaatactgtgttacgttatcttaacgatacgatatggagatgcgatgacactgcattcgtatcggtccagtaaagaagctgacgaaagaggttcatgtgaacaagggtttatctagggcggtatgcgctgtggcggccgctgcgcttgcgttcccccttgccgcgtgcggcagtggcggcggagatacgggtgccagcggcattaccgccgatgatgtccaagcggcgttggacagcgacgaggatatcacgctcaccgtgtggacgtgggcctatgacatccgcaaaaagagcactgacgcctttatgaaaaagtatccccacatcaaaatcgatctggtctcgaccggcacgtcgtcggatcattacaccaaattccagaacgtcgtcaaagccggatcgggcattcccgacatcgtgcagaccgattatgactcgatgccgcaatatgccgcgaccggatccctcgccaatatctccgaagagtcgatagagaaggaattcggctcgctctacgccgatgcggcctggaatgcggtccacatgggcgacggactctatggcattccctccgatcaggcccctgtcgcgatgtatgtgcgtgcggacatcctggaggaatatggcatcgacgtcccgaccacatgggacgagttcgaggaagccggcaagaagctgcacgaggcggacccgacaaaatacatgggagtcttcgacaccagcaatgcacatttcatggactacttcttccgcgcggcaggcgtcaaaacctattccgttgacggtacggaaaacgtgtccttcgacatgcagaacgacgagaccaagggggtcatggaacgcatccagcgcatgatcgacgaaggcgtcatcgaagcgacggcgaccggcaccgatcagttcacccgggatttcctcgacggacgctacgccacatggatcgacggttgctggcgcggcgcgctgatcgccagcaacatgccctcgcttgaaggcaagatgaccgtggaactgccgccggcatacggcgactcctccgccgacctgaaaacggccaccatcggcggaagcatgctggccatgacctcagcatgcccgaaggagaaacaggccgcggcgatagcgtatatgaactgggtcagctccgatccggacgccatcgaagcgtggcagtcctacggcggcagctatttcaatgcggcgaagtccttccagaccgactccgaacaggccaatatcacggacgacttcttccgaggggagaaggtcaaggccgtgtacttcgaatccgcgtcgaagatcaacgacgattgggacgtgcttcctttcaactcccaatacgctcaggaattcgtggacacggtggtgccggaactcactgaggacggtgacctgtacaacgccttgggcaagtggcagtcgaatctggagacgtatgccgaagaccaaggattcaacgtcgttgataagtaggattcgtgattctcgggcggcggtcgcgatgacggccgccatccgagggcgcggcaatgaaggagaatgagcatgactcacgcagccgatggagacgagcggatgccactcaggaaagaaaagcagcagtatgtcggtatgctctactgtttgccatacgtggtcgtatttctgatgggaacgattcttcccatcctgtacgccttatacctcagtttcttcaaggaacggatggtcggcggctcacgattcgtcggtctcaagaatttcgtccgcgctgtgagcgacgcgaaactgtgggagagtttcgggcgggtgagcctctacttccttattcaggtgccgctgatgctggcgctggcattgctggcggccctgattctcgactccggcaggatccgtcacatcgccattccccgtatgctgttgttcctcccatatgcggtgcccggtgtgattgcggcattgatgtggggatacatttacggtcagcgcaatggcctgatcggtcagtttttccaaatgttcggagcgcaggcgccgaacctgctgtccgccgacgccatgctgttttccatctccaatattgcacggtggtgctttatgggatataacatgctgattttctatgcttcgctccgcgtcattcccggcgagttatacgaatcggcgcgcatcgacggtgcgtccgaattccgcatcgcatggtcggtgaagattccgatgattcgcagcaccgtgatcatgacattgctgttttccatcatcggctcataccagctgttcaacgaaccgaacattttgaagacgctggttcccgaagtcatcaatagttattacacgcccaatatgtacacctataatttggcgttcaccgggcaggatatcaattatgccgcagctgtgtcgcttgtcgtcggatccatcacgatgctgatcgtggcggcagtgaagctgttcggttcacgttgggaggaacggtaatatggcaacgacgaatgcctctgctgcgtcatgggggacgcgcctggtcaaccgatggaggcgcaaggagtatgagcgcaaactgaagaaccgtcaaacggatggtcctctcatcaagctgacgccccaacaaaaaggcatgaacgtactcctccatctcatcatgctgctgatgttgctgtattgcgttattccgctgatctggctggtgttttcctccacgaaaaccaatgaaggcctatacgcgtcgttcggcttatggttcgatgacgaaaacgtgttcttccagaacatcgtggacacatttacctttcaggagggcgtgtatacgcgatggctgctgaactcgattctttatgcggtcgtcgccggcttgggctccaccattcttgccgctttcgccgggtacgccatcgcgaccatgagatttcccggccgcaatatgctgctgtggatcaccctgattttcatgtcgattccatccacggtcatcaccgttccgctgtttctgatgtatgcgaagatcggattggtgaacacgccgttggcggtcatcataccgcagctgtcgaatccgttcggcttatacctgatgatcatctacgcacagacatccattccgcaatctctggtcgaggcggcgcgtcttgacggtgccaatacgtggacgattttctggaaagtggctttcccgctgttgtcgccggggtttgtgaccgtgctgctcttcgcgttggtcagcgtatggaacaattatttcctgccgctgatcatgttgtccaacacggatgactatccgcttaccgtcggtttgaacgtatggctcaagatggcctccgatccttcggctcagcaggtgccgaataatcttattctgaccgggtcgttgcttgccgtcgtcccgctggcgatatcgttcctgttcctgcaacggtactggcagtccggtttagcggccggtgccgtcaagcagtgacgtcggaactgcttgcttgctcttccgactccgcgacacgccgaaggggtgctcacagaaccgttgttgccgaaaagcaaccattggaattccgccattgtgcgaaacctatccgccgttccgtgagcaccccttcggcgtgtcgtcgtatccggcgcgttcctacgagcagagccaatccatgacgttggtgatatggatgccttcgtcggtcatgccctcgctatgccagtcgagggtgagcaccgtgcgggggaatgcgtcgcccaatcgccgcagcgggtctaattcccgctcccgggtctgctcctcggtcatgttcaacgtgacctgaatgtactgcttgttgtttccgcgcttcgcgatgaaatcgatttcgccgtcgggcagcgatccgatggtgacatcgtaaccgcgtcgctgcagttccatgaagacgatgccttcgagctgggctccacgatccgagccgttgaaacccgtggcgagattgcgaaaaccgttgtcgacggggtagaacttgcgttgcgggcgcagcagttccttgcctcgcatgcgttcctgttgcgcgctgtagacgatgaacgagcgttcgagcgcgctgatctggttgtcgacggtggcgtaggaggcgttcgcgccggcgcttgtgagcgtgttggcgaccttgttgacggagaacaggtttcccgacgttgagaacagatatcggctgagtttttccaatgtggcgatgtcgcggatgccgtaccttcccgccacgtccttcatcacaatggattcgtatattgaggtgagtatttcggtcgccttgtcctggtccggctggccggtggcgaacaggccgggcatgccgccgaacatcatgtatttggagaacagctggtccgtggaatccgtggttccctgagcccgatgatggcgttggtattcgtcgaaggagagcggatatacggggatggtgatgtagcgacccgtcagatgggtcgccagttcgccggatagcagccgtgcgttcgatccggtgatatacacgtcggtgtcgtcacgggaatgcagccggcgaaccacttcctcccatccgggaacgtcctgtatctcatcgaggaaaacgtagaaggggccggttcgggattcttgcgtggcttgcatcaggtcggcgtgcaggtcggtcgccgaatatccgatgggcgtgtcgaaggaatcgaagcgacgggtgaagatattgctcgcgggaacgccgtcgtcgagcagtgattgcgcataatgttccagcagcgtgcttttcccgcaccgtcggacgccggtaagcaccttgatctccggggtgttccggtggctgcgcagcgtgtcggtgagcttgtctcgtgcgatataccccgtcatctccacgcctccgatttctagtgtattgcaaaacagtcgttaaatcgacgttgattttcagtatacttgaaattgtgcattctggagtaatgattctatagtgtactcaaaatcgtgtggtgggtgtcgtctgccgctgtcggctggtgtgtgctgtggtatcagggttccgttactgtttgagcggcgctgccactgttggtggggggggctgcggacgttttcttggagataatcacgcagccattccttggctttgacggtattgtaccgggctcatccaaccaagcgactgtttgatgcgctcgtggttgtaccagcgtatgtactcatcgaccaaggcgagcacctcgttgcgggtgtgttcctcccacttctcggggtagaccgcctcggtcttcatcctgccgaagaatccctccgcggccgcgttgtccggcgaacagcccttcgcgctcatggagcgcgtcagcccgaagcgttccatgagcccgagccatccgggccaccggcagtggcatccacggtcggaatgcaccaggggacgcgcgttccccgggcggcgtggcaaccgcttcctccggcatccggttggccagctccgcgtcgggaccgaacccggcggcatgcgcgacgatcttgccgtcgtggcagtcgaccggcggcgagaggtacaccttcccgtccctggccttgatctcgctgatgtccgtcagccacttctcgttcggacgctcggccgtgaagttccggtcgacgagattggcgggagccggcgtcgtctcgccctcgtaggaactatacctgcgtcgcttgggcacgtgcgccacgagcccttcctccgccatgatcctgcggaccaccttctccgatacgccggtcttgagcaccgccttgatcctgcggtacccgtacctgcccttggaatcggcgaacgccccggccacctctgccctgagtccggcgtacttgtcaacgccgagccgggcgtggtggtagtggtagctgctgggcgcgatggcgagcaagcatgtcatcgagctgagcgaatacgccggcctcaaccggtcgatcaacagggtcttctccctgttcgacaggcgccgcaggtcggcgccggggtctttttttacgacctccaccacctcccgcatcaacgcgttctccagctccagttcctcgaccctgcggcgcaaagcctccgcgtcatcatcatcggctgcggacggccagcgacgggagccagcgggcttattgccctgcgcggagttcctgtttttgggctgcaacgcggccatgccgcccttgcggtacgccctgacccagccatgcaccgcgccgacgctcacgccgagctgtttggcggcctgcttctgctgcatgccgcccagcaccagctcgactgcccttcgcctggtctccagtgggatgatgggtttggccatatggccagcataccgggaatccatcgccagccaacgctccagacactgcctggtcggataacccagatgctccaccacctgggccgtcgtcatcggcgtggtgaaatacaactccaccgcacgctctcgttcctcaagaccggacatacgaaaatctttccgttcggtctccaagaaaacgtccgcagcccctagtgtccgaaaagttgcgcactttggatcgtggccgtccatggcgcgatgaccggttcgcttccacgaggttgtcaccgagccgggacatgtcgagatagcggcgggtcgaccattcgttcgcggtgacgtgacggatgcgggcgcatatgagcatcaacgcgctgttcccgtcggggaagccgcccaccacgcgcgtgcgccggcggatctccctgttcagccgctcgatcatgttgttggcgcggatgcggcggcgatgctcgcgcgggtagtcgtcgagcaggtgggtcgtcgtctcgccgatgccctccctgaggcatctggcggcctccttgagtttccttgattccatgtccttggcggcggattccgccttctccaacgccttgtccctggtttccatggagaacacggccaaaaacccgactagtgtaaacacaccctagttgtgatggccggcagcagtattgttgctgttctgtggaccgtgtgcaaagatgcggttccagtaatcgagcatgtcttcgcggctcatggccagatagatgcccatggccagcacggccacgtcttccttgagcagatccttgatctcgatggtaccgctcagcttgggccagcgctgaagcactgcaagcatgccgcctacggtgaattcaatcatgagatcggttgtgaggtcaagatgttcggggtctcgttgcagcatgctgatcatctgcagtcggcagaaatcgcgcagggattcagtcagttccagcgtgctgtgcgggccggccagcagagccaatcggtcgagacgctggcgctgttccgggttggcgagcgtggcggtgatacgttcgcgccactgctcctcggggttgccgttcgggtcgggggtgcggttgatcgggatggattcgacctgatgcagaatggcggaatcggccagttccggcagtccggagaagtggtaatagaacgaattgcggttgactccggcctcgcttaccacatcggtaacggtgattttgcggtagtcgcggtcggcgagtagttcccagaaagcgttttcgaggcgctctttggctggcagcacctcggaatcatgacgtggacgcggcatctcttcctcctgacacattgcgctaatagtcacgctgtccaataagttattggacactataactagtatctctagacatctgtgggtttatcgttgggttcgttcttctgctcggtagcgggtgtgccgtttggttcgtcggcgtctgccgctgccttggcgttggcggaatctgtcttgtgtttggcggtggcggccttgatcagaatgggcactgcttcggctaaatgccgccgatcctcgggggtaagtcccacgaacgcgccaagcatggaggggattgaagcggggaaattgctcatcacttcgctgaacgtcgtggcgccattggagtgcagcacggtgaacagggcgtccactgcacgctcgcgctgttccggcgtaagcgcgccaacccaatgattcaactcttcgttgaacagttgggagctggagctgagatcgggctcggtgacgaactgatcgccgtccaccagccaggtgaatgcggaatgctgcataatgccgtccgaatcggaagacaccacacggcatggttcaggggtctcgaaaatcatgcccacaatcgatgagctcggcacgattttcgtcacctttggctggatcctgcggtaggcggggctggtcacgatttccgaggggaagccggggccgtccagcgaatagatatgccgaatgcggttttggactttggcgtcggcgttcatcgccgcataaatcgccagattgccgcctttggagtggcctaccagaacaatcggaccgtcccataggcgggccaccgtatccagatatgcactggctgcgcgttgggccggtactggatactggaaagccatgttgaaatcctctttccagccgattagcgaatcatcggttccgcggaaggagaggaccatggtgcctttatgcgtaggattgcgacggttgtgcccgtcgggcagttggaacgtcgccgcggcaaattgggtttgctcgccgcggttgacatgctctacgacggctcccagccgtatgccagcaaagcgtggattattgccggcctcctcgaacagggtatgggtgagatgtgggtcgatcaccgagaccatttgggcttcgtggggtttgtcatcctccgatgtatcgattgaacgatgcaattcttggttggcctctttgaggctgattgattccattgccgtatgccagagccctttgagccatatcaacggatgttcgggctcaaatgcgcggatgcgagtggcgaaggagccggattgctgctgctcatcaagcatcagcgtggggcagatgttggccacgtcttcatagatgagtgtggcgataatcagggcgtcgatttcattgaacggcaattcggagaacgggcgcaactcggtgcgtgcatagtcgatgatgcctgtcatacacgcctcccgatcttgttcatggccctacggcccaagttcatgcacggccgcagtttgcctgctgccgtgtgccttccattgtagggattgtatggttgccgatggtgcaatccgccgatggcgcactgatggcgaacaattccacatgggtttctcggcatgactcgggaaattgttgggtagttggggcggagtcctgtgccgagtgctgatcgtcggttgccagttgtcggttgccggttgccggtgggcgttgaatgctgatttatgccagccggatattcggcaggtcgaatcgcgtcatatccacgccctcgtgctcgagcagttcggccttgatgtcgagccggccgccatagccgccaaacgcacggcctgatccgaccacgcgatggcaaggcacgatgatggtgatcggattgcgcttgaccgcacctccaaccgcttgcgcagccattcgcccgccgccgcggcgttcggacagctcggcggctatctctccgtaactggccgtcatgccgtaaggaatctctgcaacgagttgccatacttcatgctggaacggagtggccgccggattcatcggtggggcctggctgaggcttgggcgttcgtctgcaaagtaggcctgcagccagtcgcgggttatgcggaacacctcgagttcggaatctggcgtacagttgtctttctgccggttcttggcggcccaccaccagtcctcgaggcatagctcggtgagcgcctcaccgtctgaagccatcatcatccgaccgatgggtgtttccgcggtggtgcgtatcaattgccgttgtgccatacagccattatggcgtgttcgcgcggctttctgcatttcgaggggctgatttacgtttcttcggaggtctacttccgtttcaaggggctggtgtccaagtagacgaggcgcaaaaatggcggaatggcgttggcattatgctgtggatacttgtggtgtaaaggatgaccggcccctcgaaacggagatagatattcggaaaagctcaaatcagccccttgaaatggaattagagctcaattttgatggaatgtggaacttgcgcgcgaagcggtggacaatgggaaccatgaacacatttggtttggggcatgacgtggtggatgtggccgcgttcgctgagcagttggggcagccgggctcgcacatgcgtgcgctgttttccgtgcgcgaggtgcggcaggcggcggaccgcgcaaggcaaaaaaacgatggcgaagctgtccatctggccgccaagtgggccggcaaagaggcgttccttaaagcgtggtgtgattttctggggggtgcgccgttcccgttcacgctggataattttccgtggcgcgagattgagattctcgatgattcgcgcggtgtgccgcatgtgtcgctgagtggtgacgcatcgccggcgttccagactgattactcgggttcgatccccgacgtccgcatctccctgagccatgatggcccggttgcgtccgccgtggtgatgattcaatccggtaataattcgcgcgaaatccgctgaacggtgcgaaatttcagcttctcttcggcgcgtcctcggttacatgcatcgaaccggtttgatatagttgacgcaacgtgtcaaacgattgacgcgagcagcggggagagacgaaggagtttccggtggctcagagcagccagtcggcacaggcagagaagtcaatcgcgcagaataaggcaaagaaaaggcataccggcactgttttcaatacccgcttcgcagctcataaggatgaacttgagcggctcttcatgagtctgtacaacgaccatgatgccttcgactctctcgtcgacagcatggctgaggcctatgctgaccgtcccgccgacctgaagcgtctcgacaagtcccgcgaacaagacccggattggtacaagcgcggcaacatgttcggcatgaccatgtacaccgacctgtttgccggggatctcaagaagcttgccgataagatcccgtacctcaaggagcagaagctcacctacctgcacctcatgccgctgctcgacatgccccacccgaacaatgacggtggctatgcggtccagggcttcgacactgtagacccgaagctcggcaccaacgaggacctcgccgcgctcgccaagaagctgcgccgcgccggtatcagcctgtgcatcgactcagtgagttatcgtttttcttcccccgtgcgcgtcgttcaggccgtcggcgcgatgagtcgggtctcacctttcatcaatttggatgtcaatccgccgaggagcggcatgaggaatacggtcacggcgccggcagccaccagcgttgacgcggtggtttggtgcatggtgccgccctgcaccgcaagagaagtcacggccacaatcagcggcagagccgttgtgcaatacagcgaaacggtgagcttatcctgcgggtcgagtgggttgactcgatggtcgagcgtcgtggccacaaaaattggcaccgcgcgcaccagcagcagcatgatgatgaaggtgatgagcagtgcaggattggccacgaccgctttcacgtcaatggatgcgctggaaaccacgaaaaacacgggaataaggaagccgtagcccacgccttcgagcttcaggttcaatgtatggttgccgttcggcgtgacgaatcgcaggatgaagccggccgcgaacgcgcccagcaccacatcaagcaggaacaggaacgccagacccagttcgctgagcagttcaacggctttggtcacccagattttatctaggatgaatggtccgaatatcgccccgaacaccagcagcagcacggtctgcggcatgagttttgccgggaataagctgcgtgatgataggacacgccactgcaatcatcatgatgatggatagcgagacgagatcataggtcatggtctgatctaatcctctccgttttcttgaatacgtttcggcagtgtagttcgtcccgttgtctcgaagcggtcatgtagtcttgccgtgtgacaaccctgcgacaggcgcggttgccatccccacagaaatatgtataataacccaagtcgccaaaagcggcgtttacgcggatgtagctcaatggtagagcctcagtcttccaaactgattacgcgggttcgattcccgtcatccgctccactatttatatgttggtgtatctaattgggaataccggaagggtgagctaccccgagtagtattagtactcatggtgttgagaatcgacgaagctgaactgcgtgccaagctctttgagcacaaagagcagattggtttcggcccgattgccaatggggttgtcatcatcatcgaaggattgttttacattcctgctgctctcacatctggactcgaccaaatttttcaaggattgctccttgcattgagcattatcttcatgttctatggaatatgaagtttgatcactgcttgcagaaataagtatgatgccataacactgtatgaggatatcgccaacatggatagaaccgaacgaagaagctcgatcattgcggtgaaagacgctaaccgatatcttctgtatcgtgatttaggttggggatgcgactttttccctaatcatgcaaccgcaagcagtactgatgaggatgttcgtcagctgacgacgtattttgccgatgaattcggaattcctgctaaagactttactctgtctcacatttgtgtgaaggattctgagaagccatccacggagcatgatggagaggttcgttattacgaatacacgctatatcgcgctagcgtaacggtaatgcctgacgcctggcgttccactgagttccatgttggtgccaaggactgccgctggatgactcttgatgagatgcttgccgaccctgtcatcaacaaaatcaatcatgatgtcgttgcgatggtgcgggataacttgtaattgttgccgtctttgggggcatatggttgttgggccgaagcgcgttctataccccgataatcatcgaaatcagggcgcagcatgctctatggaactctctataccctgaaaacactgaaaatcaggatatagcgcagtagaacagaatctgcaaacagcggtatgccgaggaatgaggtcctcttcacccacgacgtaacgcagattcgtatcttatggatcttatatataggtttgtggccaaggtgctacccacaacattgcccgtaacgccaccgcccgcaacagaacacggccttggtgagtcgtatgtttgcgttcacaaaaattgcatgtagtatgtcttcgcatatgcgcaacgacgtgtgacattgcacacatagaacggtggcatgctgacggccgacggtaactccgcgccccacgtagcggcaacaaatctgcccctattcccgaattgtgggagcagcacgccccacaggggcgaaaaagtccgttatcgtagggtggataacgggggtgccgcttttcaaaaattccaaggttcttttcaatatcgggtaagaatttccctctatccgggtggacgcattcgtgctttctgcttaatagcgtaatgccttgtaggtgtgacgccaggctttggcgtacgcgatcgtaagagacagacaaggcgatgaagagaattgtagaatggttcgcagcggtaggggccgcagcgggcaggagaggcaagcggttagtggccatcgttgccgccgtggcgatgctcggtggcgtcgccggcgtgagcgcgaccgccatggccgatgaccagtctgcggccgatacccaacagaccgctgccactaccgagactccagcgaatactgacggtacagataccactaaggataccggtagcaaggatgattcgaccaaggccgatgcgaccaagtctgatgacgccgcaagtgccgataccgatgctgccgcctcggaactcaccaagcagacggctcctgctccgacttcgacgttgaacacgcaggcagccgaagccacgaatggcagctgtgtgtatgcaggtaacgttgcctctggactgaataacgtgtgctggctggatatgacgaacttcaccgcggacaaggaccagcttcagcccatgagcgtgaagctttcggactcgttgacgatgaagttcaacatcaagtatacgggtggtcgtacgttgcgttcggccgccgtgcctacttggaataaagcggcgttcggccattacggttatgccggtttccctgaaggaaccaagcctgctctgtatcagataaccggatcttacaataccgagtccacggtagagctgacggacatcaagatcgtaaatgctgatggcagtgaaatcaccggcaattattcgtttatgatggcggatgccgagagcacgaacaacgatgagagcatctcgttcacttcttcaaacgagatcgagcaagtggcccagttcccgcaacagggtgatgccaactacaagaattatgcgttcggtgatcagacgttctccgctgaccacaagaccgtgaccggtggtggtgtgaggactggtgccaatccaggcatatacctgtacaagaccaagtcaccggataccgtatcggtgacgatgggggtccattatgggcgcgagattcaggcggcgatcttcggcgtgctgttctccaatgcggagaccactgtgaccacgaacaacgcttctgatacgtttgctggcaaggtcgagtcgcagacctatggttccgagcagaccggtggcgtaaccggttctaattccgctaccagcaaagtggtgaacatgctgtcggatacggacacgtccgaacaggtgaagttcactctgtccgccagcgaaaacactaattggaatgattacaatgtctcgttcacctgtgatggcgattgcggtgaatacgatgcaactcctcagattgatactgcgaccggcaaccggtatgtgaccgtcagcgtcgcgtcagagaagtccgcgcacggtaagtgggtcgtgaccaagaaggtcaagctggacaccccgaagattcagaagtcgatttcgaaggatgaggtggattctgcggctactggtcagaaggattcctacaccctgagcctgaatgtcaagggtaacacagtctccggtaccacgacttccggtgaaaaggccaagatcgatgtggcgttcgtgctggatacttccggaagcatgaacgacaaggttggcaattccacgcgtctgaagaacatgcagaatgcgattaccggtaatggcggtttgtcgtctgtgctgttcaactcgcctgacaagattgatgcgcaggcgcatgtgattacgttcgcgagcggtcttggattggatggtacgtcagtgctgtctacgaaggccgacctcgataacaccgttaacgggctgaccgctaagggtggtacccattgggagaagggccttgagcaggtaagcaatatcagcacaaggcctggcgcggccaagtatgtcgtgttccttaccgacggcaaccccggtgataaaggttggcaaaagtctaacgtttacagctgcggtgtgcttgactggcagacatgtgacgataacgattccgcccgttccgtatataacgcttcggtgatcgctggtaaacagttggcgaaagccggctggaacatacttaatgttggcgtcgacatgccgacaacggtgtacgtgaatccggatgctgactcggttagcggaagcaatcataaattgcacaatcattcgttcagccaaactgctggttgggtctctcctctggaggcgttgaccgcgcgtgagaatgccaacaagtccgctacggtcaaggaccagctgattaaggcctacccgaagaccacttccagtgagttggctcaggtgttcaaggacctcggccagatcatcaccacgaccacgacgaagtcgtatggcaaggtgagcatcgtcgataccctgtccgactatgccgacccgttgttcgagtatgacaagcagtctggtgagattacgtctggcgttacggtggttacgagtgacaggtcgaatgttgatgccgaagtggcgtccaagacctatgatgtcgctacccgtacggtgacagtgacgttcagggacggcttcacgctggccaaggacgtgacctattcggtgcagttcaaggtcaagccttccgataaggcgtatgagacgtatgcgtcgaacaagcagtccgaaaagggcggctacacggatacggataacaccgtgcatcagggtgaaactggtaccggtacagattcggaaaacaaggacggtttctattccaacgcggaggcccatttagcgtattccgagtgcaccgcagtcaacaatgtcgcgaaggattgcgtgtcgaaggataacgtgacatatcagaagcctgtcctgcaggtgaagaccggcaagattcaggtgaccaagaaatgggatccgaccgattccgagccaaaggatggctcgaaggtgacggtcaacatctacaagggtgaccatgccgacgacggccagaaggtcgataccctcaccctggccaaggatggtggctggactggttccttggggaacttggccccaggcacctactttgtggaagaaaccaatgtagacggttacacggcgtcctacagccagagccagacggtgaccatcactgccgacgatctgtggaaggctgagccgaacatgacgaagttcgacaacgttaagacatatgacgtgactatcacgaacacgttgaaccgtgttgatcttgatgtcaatgcaaacgtcaaggtgagcaagaccgtgcagggtgccgccgcgtccaaggacttcacattcaacctgacctgcgccaaaagtaacgccgcgtgcaaggatggcgtgacctggccgaaggatagcaacggctcgttgaccgcgaccgcgtccaagtccgacttacagaccattggcaccccggcggatgccaagttcccggacggttcgacgttgcagctcaaggccccgaccggtacgacttcggccgtctacgagttcacagtttccgaggatcagtcgggcaatcccgcgggctggaagtacgacaccgatacggtgaccgtcaaggtcacggtgagcaagaagactgacggctccggctacaagaccaatgtcgagtacgtgtacgccgacggcgattccgataagacggataatccaaagtcggctgacttcacgaacgtctttgtcgccgtgtctagcttgccggtgaccggtggccgctcggcccgtgactggctgatctacggcggtggccttggcctgttggccttgttggccggtgccggctacaccgtctggcgcaagcgtcagctcgtctgacccgaacagcctgaggcggccgcccctggctcccctcagggaggggagctggccgccgaaggcggactgaggggagtcgacaaaggctcctctccccggagaaaacacattaaaggtgtacggagattgcgaagtcccttggcagaaggaccggagtctccgtgattgcagaaaacaagtacaaagtaaaggaagagagggcttctcatgaagttgaggaagcttttcgcgggcgtcgctgcggcggcgaccctgttgggcggcatggcgttcggcgccaccgccgccaacgcggcggataccgcgtccatcaccctgagcggcaagaccgtgaagggtaccgtgtacactgcgtacaagatcggttcctatgacactgccagtgcgaaggtcgagaaagacaagctcgcgtccgtcggcgtgacgacggaccaggcttggaagacggatgccgagaacgtgctgggctccacagtgactaatactccggagtacaagggctacggtgatccgctggcctatgtggcgggcaccaccggctactacaccaacaccccggcaacgctgccgaacgcctccgcgaccatggaatcgttcgtccagagcctggccggcaagctggatggcaagacggccgtggacccgtcccagacggttgccaatgataacgacaaagtcgtcttctccggccttgacgagggtctgtacctgattgtttccaagacggatactgaacccgccacggacgccggctccccgctggctatcgtcggcacccaggtgaccgtcaacggcaccgcgtacacgaagttgggtgcgaacaatcagacgctgggcaaggccgtggtcaagccgtccaccccacagaagccgagcaagtccgcgagtgacctgaacccgtacgtgggcgccaccatcacttacacgcttgagggcaccgtgccggccaaggccaattccttcaagttcgtcgataccccgagcgctggtctgactgtcaagctggataccctcaaggtgaacgttcagggcgaaactgacccgctcgccaacaccgagtacacggtcgaccccgcctccggcgactttaacacctccgctgctaagccgtccttcaccatcgcgctgaacaacgctaccaagtaccagggcaagcacatcgtcgtcaagtacaacgcgctggtcaacaagaaagccaacgtcaacggcaccaacaacgatgtcaggttcgacaactccaaccagaccactaccaccaccatcaccccgcagctgaacaccgtgaccttcaccaagaagggtgtggatgccgacacgaatgctctgaagggcgtcgtgttccagatcgtggctgatacgaacaacgcaaccccgctgccggacggtaccgcaaccgaggccacctcaggcgacaaaggtgtggtcacgttctccggtctgccgaacggcacgtacaccatcaccgagaagaccccggccgatggctacctgaccaccgccctgccttcgttcacagttaccgtcgagaacggcaaggtcaccaacgtcaccccgacgggtgtcggtgccggcctcgtgaccttcgagaacggctacgccaacatcgtggtgaagaacgtcaagaagatcacccagttgccgctcaccggtgccgccggaaccatgctgttcaccgtggtcgccgtgctcctcgccggtgttgccgcgaccgtgttcgccaagtcccgcttcaccaagcgcgccctcgacgcgtgaatcgagagcaaataatctgccgtttgattatctgtagatgttcaagtgaggctcgttccgaaggttgcttcaggacgggcctctttttttgagaaaaaggagctgtttatggaacagccggcgaagagatattcaagccaagatgtatggaaaagttattggtgtggtccaaccatattcgatcgtatcggtaaggattttgacaagagtggctatgacttgcattggctgcgtgatgcgctgacctctgcctatgacgttcaggagagttgcaggtcgagcgtcaatgaaaagcttcggcacccttacacgttatcggtgttggagaaggcgcgcttgctgtgtgacgcgcaagataatcggcaagcgtccagtataggtattgttgatattgcggtgctagcattgtccggttttgccgtattggcgtcagtaatttctacgtacaaggatatgaatatctctcaggagataatgcctgctaacttgatactgcttattggactcatcgtgctgtttgccattcttatgggtgaagtaatttatctatccaggcgggacaatcggcgtgacaggcttcgcgaagctttggctattctcattgcggaggatgaacgaaccgcgaaagaaaaggaacaggcttcggatgaggagctccgccaactgattcataatctgttggcgattagtgtccaagccgctagcgctgttagtgataatagtgctgctggcggtactgctgatgctgatgctggtaatgatgatggggatggtgacgcttaatagcgtctattttccataatcattgcctgaggattcgacactcaagcatacataggccgtcataggccgttttgcgagatatggagggccatcagtcctggacactgatggccctccatcatgcttccctatcgtttccctcatctcaatatcggggatgaaacctaccctactaggggttagaaaagtccgtataacaactgctatcatcccaaactatgacatgcccccatattcaggggatgcgaacgaaccttccagagatataaggggtgaaaatgactgtcggtggaggggcctttagccccgaagaggtcaagtacctgaagtcgttgccggcggtggcggaagccacttcgagacgcattacctacacagacgacttcaaacggtattgcatgacccgttataacgaaggtgcctcgccggtgcgtttgttccgtgaggccgggctcgattccgccctgatcgggtacaagcgcatcgaacgttgccttgcccgctggcgcgaggcacaggatgaaatcctgggtgccgaagcgccggaacccgccgagaaaaacagcctggggggggggtatcgcattcgaagttttatcgatcgggaacctctggaacgtcagatactgcgaacgagtggcgtgagacggagggcgccgcgattgcggcgaaagccggcagcgaatccgatttccacgtatctcctgaacgccgcgccgtcatcttccccatctcccgcaaagagcagaacaatgatttgcgtgacctgctgattgctcagcaagtacggcgtatcgatgagctggagcggcaggtcgatatgcttgaggctttgctgcatagcgggcggcgggggagcagagcatcatcttcctcgcttccgaaacgcgaatcgggcgagcggggctcgtctgcgggcaataatgacgttgctcccacggattcggatagggagaatcgtaacgaggaccacggtgagggtcatggcgagtaatcgatcgcatcgaaaacttgcctaacacacacgctaagataggcatcgcaataatcggcaataagcaggtaatcggcgaggcggtgcatggagcaggaacccaacgagcaagaacctaacgaggcaacggaaatcgtgggcagcaaggtggagactgtcgaggtttccaagcatcctgaagcatccattcccgaaaccgacttgtctttggcggatatcgaacgtcgtcgctcgcaccccgtgcgctgggcggtgaccattctggccgtgctcgccgccatcatcgccccttattggcttggccgttcgttcgccgtgaacaacaccgaagctgtggtcgccgcgctgggcgacgtatctgcgcagggtatcgcactggtcggttggactgtagtagtgattgcttacgtgggcctggtgatggccatcgtcgtttccccctcgtggccatggctgattgtgttcgtggtgggccttgcggccgaacagttcattgctggcctgagcatgctcaatctccatttctggtattcgacgtatgtggtttacggcgaacaatccaacatcgcgaatgcggcgaatcttggcatactggcagcggcaatcggcgttgccgtgtacgccgtgatattcgtgggtttgctggtggtcattaagaaaacctcgccgctgaacgtgctgaccaaaagctgggccagctttattctgtactttgttatcgaaggtgtcgcactgttcgtggtgctgtttggcggactgcttaccgcggtgtgaccaatcggctggtcggctgtctgtgcattgccgtatagttttcatttggcgtgatttcgcccgcggatagagagcgtttcgagcgcaccgcccggaacaccgcgcaacgacacgattaaggaggatgccgtggcactgacggctgaagagaagacccagattatcaacgagtacgcgacgcacgaaggtgacaccggttcccccgaggtccaggtggctctgctgtccaagcgtatcgccgacctgaccgaccacctcaaggagcacaagcacgaccaccactcccgtcgtggtatgcagctgatgatcggtgatcgtcgccgtctgcttgattacctcaagcgcgttgacatcaaccgttaccgctccctcatcgagcgtctgggtctgcgtcgataattgaagacttccgcccgagtacctaggattggtgctcgggcgttttacatacgccagccaacggcaacaacggcaagagggttagaggataggccgaaggcaccacggtaaggtgcggccaacaagagaacccgaatgaaggggttgacacgaggaacggcggccaaggggccagccgaaacaaggtatgtgacgtccgctgaagaggacagtcgcggtgcggtagaccgcggcacagtttgtaggaataagaaaattaaagaaggaggaaccctaatggagggtcccgaaatcaaggccgttgaggccgtaatcgacaatggaacgtttggcaagcgcacgctgcgcttcgagaccggccgcctggcacagcaggctgatggtgctgtggccgcctacctcgatgacgattccatgattctgtccaccaccaccgccggctccagcccgaaggagaactacgacttcttcccgctgaccgtcgacgttgaagagaagatgtacgccgccggcaagatcccgggctcgttcttccgccgtgaaggccgtccgagctccgaggccatcctcgcctgccgcatcatcgatcgtccgctgcgcccgctgtttccgcacacgctgcgcaacgaggtgcaggtcgtcgagaccgtgctcgccgtgaaccctgatgacgcctacgacgtcatcgccctgaacgccgcctccgcctccaccatgatttccggtctgccgttcgaaggcccggtctccggtgtgcgtctggccctgatcgacggccagtgggtcgccttcccgcgctggagcgagcgtgagcgcgccgtgttcgagattgtggtcgccggccgcgttgtcgagaacggtgacgtcgccatcgccatgatcgaggccggcgccggcaagaacgcctggcacctcatctacgacgagggccagaccaagcctgatgaggaagtcgtggccgccggtcttgaggccgccaagccgttcatcaaggtgatttgcgaggctcaggacgagctcaagaagatcgccgccaaggagaccaaggaattccagctcttcccggagtacaccgacgagctgtacgcccgcatcgacgagatcgctcacaaggatctggacgaggccctctccatcgccgagaagctgccgcgccaggaccgcatccacgagatcaaggagcacgtgcgcgaggtgctcgcggacgagttcaccgatatggacgatgccgagaaggacaaggaactcggtaacgccttcaaggagctgcagcgccagatcgtgcgtcgccgcatcctgaccgaggactaccgtatcgacggccgtggcctgcgcgacatccgcaccctgtccgccgaggtggacattgtgcctcgcgtgcacggttccgccctgttccagcgtggcgagacccagattctgggcgtcaccaccctgaacatgctcaagatggagcagcagatcgacgctctgtccggtccgcagtccaagcgctacatgcacaactacgagatgccgccgtactccactggtgagaccggtcgcgtcggctccccgaagcgccgcgaaatcggccatggggccctcgccgagaaggctctcgtgccggtgctgccgagccgcgaagagttcccctacgccatccgccaggtctccgaggccatcggttccaacggttccacttccatgggttccgtctgcgcctccaccctgtccctgcttgccgccggcgtgccgctgaaggctccggttgccggcatcgccatgggtctcgtgtccggcgatgttgatggcaagcacatcttcaagaccctcaccgatatcctgggagccgaggatgctttcggcgacatggacttcaaggtggccggtacttccgagttcatcactgccctgcagctcgacaccaagctcgacggcatccccgccgatatcctggccgccgctctgcagcaggccaaggaagctcgcgccacgattctcgaggtcatcaacgagtgcatcgacggcccggctgagatgagcgagttcgctccgcgcatcatcaccaccaccgttccggtcgagaagatcggcgaggtcatcggcccgaagggcaagatgatcaaccagattcaggaagacaccggtgctgagatcgctatcgaggatgacggtaccgtcttcatctcctccgaaggtggcgaggccgccgagaaggccaagtccatcatcgactccatcgccaacccacacgtgcctgaggccggcgagacctacaacggcaaggtcgtcaagaccacgagcttcggtgctttcgtgaacctcactcctggcaccgacggtctgctgcacatctcccagattcgcaacctggccaacggcgagcgtatcgacgccgttgaggacgtgctgaaggaaggcgacaccgttgaggtcgtcgtgcagggcgttgacgatcgcggcaagatttccctggctatccccggtttcgaggatcaggagaacaacgccggttcccgtggtggccgtggcgatcgtgatgatcgccgtggtggccgtggccgtgatgatcgccgtggcggtggccgtggccgtcgttccgaccgtgacgatcgcgacttcgacgatcgcgacgaccgtccgcgtcgccgtcgctccgacgatttcgaggatgactacgaggatcgtccgcgtcgccgtcgttccgatgatcgcgacttcgaccgtgacgaccgcgattcccgcgatgatgatcgtccgcgtcgccgtcgctccgacgatttcgaggatgactacgaggatcgtccgcgtcgccgtcgttccgatgaccgtggcgatcgtgatgaccgccgtggttctcgtggtggccgtggccgtggctccgaccgcaacccgcgctacgccaccgacgacaactacgacgactaccgcgccgaccgcgaagagcgctccgagcgcccgcgccgccgcgttcgccgcgacttcgatcccttcgaggactgatctcttatctggctcctctctctgaggggagctaaacaaagggcctctgtaccgattcattcggtacagaggcccttcgcataccaagcacccactctcgcatcgtgtctccgaatgggacaatgcaggaattccgccattttttctggtgttgtcccacacattgtagtttgcggaatcaaggccttaatataagaatggcattattccaacgattctttgatttgtgggatgggacaacgcgagtgtatatcgtttgatgttggtgttgtcccacggataagtgggacaacaggggagaaatgctggaatcggcttgttgtcccacaaaacacttaattatcggtcattctaagttcgtatggtggacgtctaagagatgacgtttgctgatggcattcatagcccgaccggtcggcatctatgcagtgccattgctagcgctctcgcaacggagccaactggaacacctcatcggactgggcggcggcctcgggactgtgcgtcacgatgatcacgcacttgccctccgcatgcgccagatccttgaaaatccccatgatgtcatcctgcgtggcgaggtcgaggttgccggtgggttcgtcggccaagataatctgtggatcgtagctcaacgcgcgggcgatggccacacgctgctgctcaccgccggacaggtgcaggatacgctcgttcaaatactccggctgcaaacgcaccttttcgataagctcggcggcgatctgcttcttcgggcggtcgaaagtcttgcccgaaacatccatggacaggatgatgttctctgccacggtcaacgccggcagcaggttgaagctctggaaaatcacgccgatgtcgtgactgcggaaccggtaacggtccgctttgtccagatccaccccattgtgcagcacccggcctttggtgggcgtggtcaaccccgaaagcagcgagagcagcgtggtcttgcccgcgccggacgggccggtgatggacaccaccgtgccagggtggaacgcgtagttcttgtcgatgagcacgcgcttgccgcctttggaatacgagtaggatacgtgttccagttgcaaggccggttcggtggtgggttcgacgatggtcgcggtattggtttcgattgcagtattcataatgatgttccttagttctgctccccgctggcgggacgctgtccgcaaagctgactgaggatggttgcggaggcgaggtgggaaccatccccacccgcttcgcgggagccttcgccagcgggggcgggtaatgattacgaacggtcggcgaggatctggagaggctcgtatcgcatgacgaacacgatgccgaccagcgcggaaatcagcgtcagtccgaggccgatcagtatcagctgtccgaccaccgcaagattcacggtggcgttgatttcgctcacataatcgactgcctgactcatgccgccgcgcataccaccaggctgcccgccttgtgagtcgccgttacctgatgaggaatcattgccagacgaaccggattcagaattgtatgagtccgagccgtcgacggaagacgagccagagtcaccggaggaattggagctggaatcgccgtttccggtggaagtattgccgccggaagccccggagccgcctggtccgccgcctggtccgccgcccatatcaccgccgggcccaccctgaccttgctgattggaagagcctgagtcagacgatgaatccgaagagttcgccgcgttcgcggtgctggtctccaccggttggaaggaatcggtgccggagacgccggtgctttccgagtagtacgacgaaacggaaacgctggaggctttggcgtatttctggtagtcggccaaggtcaggttgctgctgtcgagagcaccacgcatggcatcgaagtcaggcgcactgtccgaatcagatgaatcagacgaatccgaggagccagatgacgaatcgctcgactgcgattcgcgcgcctgttccatcagtttgctgcggtccacgctgatcgtcgcggtcaccgaagtgttgaccagcccggtctcgcgcgcattgtcagcggcattgcggatagccaatccgatggtggccgccgcggcgataatcgccacgatcagcacgatgagaatattgcggcccttattccgtattaccgttttccaggcgttgttgagcacgaacatgatgcttcccttgggccggtccaagatggactgattgatacgtagtgcgattcgcggggcgcgcttgccggtgcgcttgtgaaccgtctgggaaccactatcgaatccgtcgatgattgcgcactgaagcgagcctgatagctgccggcaacttagatttcacttatctggagcttttctgagagctttctgggcacgccggccgttcgaaagtgttgctaccagagcagtgtgccctctttgtggcagaacgttcgcgtctcaacgaggggcacgcgaagtttctgccgtttgaccgactcgaaacggcagaaacttcgcggggtattcgtcgctccgtgcgatttctgccgtttctgccacactccaaggacgtagtccaggcgaatgccgtaaaaatctcctgttttcacgcgatgtgtggaagaatggtcactgaagggcccagcaaaggagcatatatgagtgcaggtctgattatcaccattgtcgttgtcatcgttgtcgtcgttatcgttgcgttgatcgcttgggcggtcggtgcctacaacaacctcgttactctcaagaaccgcgtgaagaatggctgggcgcagatcgacgtgcagctcaagcagcgcgccgacctgatcccgaatctggtgaacaccgtcaaaggctatgccacccatgaatccgaggtgttcactcaggtgaccgccgcccgcgccggcgtggtagccgcggccaacgatccgaacgccaccaccgctcagcgtgccgccgccgaaaaccagctgtcccgtgcactggtcaatctgcaggccaccgccgaggcatacccgcagctgcaagccaaccagaacttcatggatctgcaagcccagctcaaggaccttgagaacaagatcgcctacgcgcgccagttctacaatgatgtggtcctgaagctcaacaccgccattgaaaccgtgccgaccaacattatcgccggtctcttccacttcgagcaggcccagtacttcgaggcggatgacgcctcgcgccaggctcctcaagtcaagttctgatgatgtgaaggcccgctagacaacagccaagcgggccttattgctggtcgttaggggaagactgtatgaagaagcgatttatccgtgctggtgttatcagtgcgctgattacgtttgcggtggcatgctttgccgcattgatgatggtcataatgccagctggcgattctgcggatctcagctatcgcacgcttgactatgacgtgaccgccactgcggatggcaatctcaaggtcacgcagcatatcgatgtcaagcttcgcgatcgttctgatgatgacggagatcgcccttggaagcagctctttcagcaatattcactggctcccggcaacttgactgatattaccgatatcagtgtgcgcaacgtcactgatggcatcgattatgcccagcagaccgagcccaaactgcccagtgccgtgtcatccaacgaggcatggaacagcgattatgccaaccattggtatatcgccgacgtcagtgcgagcagtgacaatccccagccctacacgccaggcacggacggtattcaggtcggggagtcctcgaagagcgccaaaaccgtggagatcggctggaatatcccggtaaccaccgaagccaacagcatgaagttcgaagtgagcttcaccatgcacaatgtggctaccaagtggcaggacgttgcctcattccaatgggaaccgttcggcaaaaagaaccaagtgcccattggcacggtcactggcactgtgcacttccctgaagacatcaccggcaaaacctcatgggcatggttgcacaccgaacgcacctccgaaaccaagcgggagtcggacggcagctacacgttcacggcctacaacatccgtacgggcgactatctggacgtggtcgcggcctttgactccagcaaagccggggatatggcccgcacccagcccggtgaccatctcaacgacctcaaaaccagtgaatacaaccagcagcaacgttggcttgaccatcaacggctcgccgctcgaatccggctcatcggctggattgccaccatagtgatcggcttggcgctgtgcatatggggcgtatgggccgccatcgcaagcaaccgtcgcgcgcaataccacggcgacatcgaatactggcgtgaccagcccggtatcagcccagcttcggcggccagactcatcacacttgtggatgcaagcgctaccggctcctcctccgaccgtgagctgacggccaccatgctttcactggccgtcaaaaaggccatcgccatttatcctggtcctgcggatatgtaccgcggcatcgacatgagccaagccacgccagtaggcctgagccagatgattgccgcagatcccggcaaaatgaacgcggcacgcaacaccagcaccatcgtgattctgccggccagccttgatgcggcgtccaatatcgaacaacttggtctgagccaatccgaggaagcgctgctcgctctgctgattaccatctctcagcgcgtcggatgcccggtattcgacctgaaccagatgaagaacgtctgcaaggactgggcaagcggctatctggagctcaataaattcacggattcatgcgcggccgaatactctccattgaccagtacggcgtcttcccaatgggctgttgccggtgtgctcgctgtggtgcttggcctcggagccttgatcgtcaatgggaccactggttttatggtggccggcatgatcaccggttcgccgcttctgctggtcggtctgttctgtctgttgggcggcacgtcaaccgcactgaccgaaccgggtcatgagatggcgggacggtgtctgggcctgaagcgctacatgcaggacttctcgaacttcgccgaccgtggcgctgccgacatagccatgtgggattggtatatggtgtacgccgctgcattcggcatctccgagcgcgtgatgaaggaactggccaaggcctacccgcaggtcaacgacccggcatggctggatgccaatgccgcaggaacgttgttctactggaactacaggccatatggctggtacggcggccgttactacggtgattccgcaacggccgatcaaggtaacctcggtgctgcagggccggttccggcatacggtggcacatcgttcgccggtgggttctccgaccttggttcacagctgtccgcagggttcgcggacatcagctcgaccattcaggcggcagcgccttcatccgattccggtggcgatttcggtagcttcggttccggcggcggtagcggcttcggaggttcattcggcggctccggtggcggttcattcggaggccgctgatgaggcatcgcacgatacgctccatcatcgccacgttgattgccgccgcgaccatcacggcgatactcatcgtgacactgctcatcttcaattggtttaccgccgatcacccgaaactgtcgtaccgcagcctcgactatgaggtggccgtgcagcccaacggcgacctcaaggtcacccagcacatcgacatgaagctggacagtcgaggcaagaacaggccgtggaagcagctgtattagacctacgaaatcaacgaatacaatctttcgaacatcatcgacatctccgtcaccaatacgaccactggcgaaacgtacacgcagcttaagggagatccgctgcagccggccgatgtgaatggcgacgaagcgtggaacagccactacgccaaacactggtatgtggtggcacgaaccggatcgacactgaagcctacgcctaccagcccggcaaggatggcatcccgatttaccagacctgggatgagtaccaggattacgatcagggtatttccggtcgaaagatgcagcttctggaaatcggttggaacatttcggccaccagcaaagccaaaagcctgaaatttgaggtgacgatgaccctggtgggcgccaccacgctctacagcgatgtggccaagttccagtgggagccggtcagcgagctcaacgaaacacccatcggcaaagtgactggcaccgtgcgattccccaacggcatcacggctagcaactcctgggcttggctgcactatacgggcgtttcaaccaccgaacgaggtgaaaacggcgagctgaagttcgcggcgaacaacgtgcgcgtggaccgctaccttgatctggttgccgccttcgattcgtctgtaatgcacgacacctccggaggcaaggccggccaacaatatacgccggcagacgattggattcgcaagcgggattatgacagtctagccgagctcaagcagtccgaaaaagataaggaagcacaggcgcgcgccgagcaacttaacacagtaaagaagtgggccatcacgcttggtataggtctgggaatcagcctaatcgcactgattatggcaatcttcggattcgtgcgtgtgcaccttgcggtcagaagccgggataccatgtacgttcacgacattccgcagatcgggccggtgagcgtggcgcgtatcgcctcgattatgggactgacaccaaaacatggctacgatcatcgtcagaccgccgccaccctgctctcgctggcagccaagggcgcaatcgccatatatcccgggccggcgagcctgtatgggggcgtcgagctgactgggcttgcggccaagacgcggccgttggctttgcgggcggtgagtcagatgctgagtgggagcggggctgctgatttggcgctctgggaccagtatcttgtttatgccacggcgatgggcatgtccaaacgaacgctgcgggaacttgccaaagcatatccgcagattcagaaccctgactggttggacgataatgccacagattcgttggcgtattggaacttccggtacgcctcgatcggcgatacccatgatggctcgtcgcgtgcgagcaccggcgatggcactggccttggtttcggtcttggcccggcagactccgaccacttgggtgccagcttcggcggcatcctcgatttcggcgcgcaactaggctccggattcaacgaaatcagcgccacgatccgaggcgtagccccagcatcggcatccatcgacggatccagcggcagcttctcaggcggtggctccggcggaggctcgttcggcggacggtaatgggggagtacttaagcaatcaaaaagcccggtgtcgtaggacatcgggcttttcacctataactgaggttaaggaaaacctcggcagtcaggtccaacggggcgaaagtctgtggcgccgcctagaagattgccccgaagttgacgcgacctttctgctagcaaacatcataccagtatccatcgaaccttccccgtacactgagtggatcacatcaaggggctattgacgtggtgccttggtgcgatgtcattgcgccagccggtgtaatggctacctataactcaataaggaggttctcatgggaggaaacgactgtgacaaccgtccgagacctgaccggcaataccgggaaggcctgatggcgggcctgttgatagccttggccaaccaagttggacagggatggtcgacggccattatcatcgccacactggtactgcttggtctgagtctcaggcgaggccgctgattcgtcagcggaacagccggaacctttgacgggttccggctgttcgtcttcacttaagccttgtggagtgaaatccagcggaatgcctacgctgggatatggatagacagctggctgcactcgctgcagccacccaccaatgaagggaattgccatgacattgttccgtcagctcggaccgttctccaccaccgccatcggtcacggcgaaatgccgctgaccatcgaaaacaaccgcggccacgaggtcggcatcgaaaccctgcacgcttcgctggatgccggatgccgccatatcgacaccgcatgggcctattactgctccggtggcgaggagcagaccggcgagaagctggtgcgcgaggcccttgaaacgtggaagggtccgaaggatgaggtactggtagccaccaaggtgggccacttccgcaacttcaccgacgaccgccccacgtgggatgtggatggtcgtccggagaacctgattcggcgcggcaaggagagcgcactggcgctcggcgtggacaccatcgacctgctgtacttccaccgcccggacccgaaggtgccgtacaacgagtccgtcgaagccatcaagcagctggtggacgagggcgtggcgcaggaggccggtatctccaacgcctccatcgagcaaatcgacattgcgcgcggcattctgggcgacaagctcgtggccgtgcagaaccagtactcgccgattcacctggagacccaggacacgctcgactactgcgccaaggtcggtctggccttcgtgtgctggagcccgctcggcggctaccgtcatccctatgatgagaccaagttcgacccgttccgcgaggtcgcggcggcccacggcgtgagctaccagcaggtcgtgctggcatgggagctcgccaagggcgaccacatgttcgtgattcccggcgcgcaccgtcccgagaccatccttgactccctcaaggccgaccagctcgaactcacccccgaagaactcgccaagctcggctgattgcccattccccatcctcccgaatttgtgccgctgacgttggcttaacgtcacaaattcgggaggattgattcgtcttgaaggaaccgccatgcgcaaaaaactcatcctcgacctcgataccggcatcgatgacgcgctcgccgtcgcatatgccctaggcagtgccgacgagatcgatctgatcggtatcacggccacctacggcaatgtcgcggtgcccctggccgcgcacaacgcgctggcggtactgcacctgttcgggcgtgacgatgtcccggtctatcccggagtcgaccatcccatcgccccggcaacattgccgacaatgcgtggcaccacgccggatgagcggacccaggcctatgcgcgctggcagaacggcggcgcggacggctggcaaacggacgttccgtggtcaccaactcccggctcggtggcggtccaccatcccaacggcatcggcggcgcaatcatccccgactccccgcgcgctccggaagcaccaggctcggcggtcgatttcatcatcgccgccgcgcgcgaatacggcccggacctgaccatcgtacctacgggcgcgatgaccaccatggccaccgtgttccgcaacgctccggacctgaaggattccggcgtgaacgtgacgttgatgggcggtgcgttgacgttgcccggcaatgtaagcccggccgccgaagcgaacatctcccaagacccagagtcagcagactatctgttcaagtgtggcgcacgcaccaccatgatcggcctcgacgtgacccaccagaccgcgctcacccgtgagaaagcccatgaatgggcgtctctggggacgccggccggcgacttcctcgtcaccatgaccgattactacatcgatttttacgtaaagaaccagccggaaatccacggctgcggactgcatgacccgttcgctgtggctgccgcgcttgacccatcattggtcaccacgttcggcttcaacctacaggtcgatttggagggcccgttccgtggccgcaccattggtgaccgctcgcggctgcaagatttcgacaagcacactcaggttgcgctcggcgtcgacgtgtcggaattcctcgaccgctttatggctcgcgtcaccgccgcggctcgtgggtaaacgcttatgctttggcggtcgtgtcggttgctgaagcgtcggttagtagtgcggacaatgcggttctagcttccggagtgatccacatggtgtgtggataaccctgtggataactagtggtacgattcgtcgtcgtgtatatgcgggatggcatcggtcggtgtgcatatgtttatacacttcaatatgctggagggtgaatgttccatgcctgatctacggtgacgggcggcaagcgacgaggtgtatggatggttactgcaagggatgtggcaaagcgcgccggggtgtctcaggccacggtgtcgtatgtgatgagcggtagcaggcccatttctgaagccaccaaaaaacgggtgcgcaaggccatggatgagttggggtatgttcccaatatcaatgcgcgatcgttggcgggtggcaaggtcggtgtcatcggtgtgctggtgcatatggatgagaataccgatttggccgagcttcgcccgttcctggtggtaatcatggaggaggcgagaaagcgggggtctagtgtgatgctcgttccggccgacgaggggattgagggactgtgccgtatggtgcgtcaaggcgtggtcgatggcgtcttggtgttcgacgtcgagtggcatgatgaacgcctgcctgagatagcgcgattggatattcccgttgtgctggtgggtacgccagaaaacgcacatggcctgccgtgcgttgatgtggattatcgtcgagtggcgcagatggccgtcaatcgtttggcggaacgaggggcgcagcggatggtccttgttggggactggggaagaagtctcgaccgttatgcgtttgctaagttcttcgccagcgaatctcgtgtggtggctcaagtgctgggcatggaatatgagatattcatcccgcgtgaaaaaggatggaggggcatctgggcgatgaaggatgaattgaagcgaatggctcaatgccatggcggtattgcagtgcgcacccctcatgtgttagattcgctgctgcagctttgtgtggaaatgcagattcagcctggacgtgatttttccttggtcgcggtgtatgtggatggtcatgacgaagagttgcgcgtgccggtggataatgtggatccagtgccgcagtccgtcgccaaagccgccatggggctactgttcgatcggatcgatggacataaaactggtgaaagattgctggtttctccgcatatcaccatccgtagctaaggagtatgtccgattctcggcctcgtgtggttcttgacgtcgcgtagtttatgcgcatcaacacgccggtgttgcccgcgtcggattcaatgatatatttatttatgcgcatcaatattgaagcgtataaataactgaaaggacttagttatgaggggtaatacaaagaagttcgccctaaagtcagccgtggcggtggccgctacggcagccatggtcgtgccgatggccgcatgcggttccggtaccgcaggtggcgggaaaaccaagatttcgttctattcctacttcaaggacaaccagattggtgaggtcgtcaaggggttcgagaagaagaaccccgacattaccctcgacgtgcagtatggccaggatccggcacagtacatctcgacactgcaaacccgtcttgctggtggcaagccgccgaccatcttcaatctgacgatggataaccgtaccgatgtcatgaaatccggtgccgcgttggacatctccggcgaggatttcctctatggcatcgacgacacaaacttcgccttgttccagcaggatggcaagacctacggcatgccggtttccgcatgggtgggcgtgttcttctacaacaaagacattctcaagaaggccggatacgataaattccccaagacctgggatgaatttatcgagatgggcaagaagatcaactccaacggaagcaccgctttcctggaggacttcaatactcagatcgctggctcgttcaccggcttgctggctagctattacggcgagcagggtaagtccggcgatcttgacgcggacatctggtccggcaagtccactttcaccaaggactggactccggtattcaagaaatgggaagctgccgccaaggccggtgtaattcctcagaaatccgttggtctgtcgggcgatcaggtcaagcaggaattcgtgagcggcaatcttggcgtcatgcgctccggtccatgggatctgcctgatctgcagaagtcagacatcgacttcggcgtggcaccgttcccggcctacagcaaggaagacggccagtggatcaacggtggccccgaccaaggcttcgccatcgcgtccaaggcctccgacaaggagaaggccgcagccaaaaagttccttgcctatctcaacagcgaagagggcctcgaggcgtttacctctgccgctggcaccctgtcgctgtcgagcaagtacaatgccgaacctcctgccgaactgaaggatgtagtggataactacttcaagcagaacaagttctactgggtcaactggccgaagtcccctacggtgatgtccaccgaggatatcgcccagcagcagaagatcgtgcagggccagatttccgccaaggaggctgccaaggctctcgacgccaagtgggcgacgctgaagtaacccatcacaccaccagttcctttctctcctcctgacaaggccgtgccgatcgcccgttcggcggcaggcacggccttgctatgtcaaatcgaccataattctcaaggacttcccatgaccgctgcaaccattgggcatgcttccaaaccaaaatccaagcgtgcatcatccttatgggcggaaaacctctcctcattctggtttcttctgccaatcatcatcatattcttcatccttaccgtcgtgccgttggcacagtcgttcttctattcactgaccgattacgacggatactccgaaaacttcagcttcgtggccttcagcaactacgttgcgatcttcaaggacccgtcgctgctatccgccctgggcttcaccctgctgtatgccttcggcaccacactgttggtcacctgtttcgccattccgctggccgtgaccctcaacaaagccatgtggggacgtagcttcgcccgttcgctgttcttcttccttggtgtcccggcgcaggccatcattggtctaatttggcagtacatcttctctccactgggttccggcgtgatgaacaaagtcatcgcggtattcggtataccgaatatcccttggctggccgatgacaattgggcccggttctgcgtgattttcgtggccgtatggatgcaggtcggctggcacgccaccctgtacctcgcctatctgcaaaccatcccggcggacctgtacgaacaggctcgtgtcgacggtgccaattcccgtcagcagttcttccatatcactctgccgcagctcatccccggcatcgtcgtctcgatgttcctcttgatgaccggcggactgaaaatctacgatctgccgtacaccttgaccggcggtggccccggatacgccaccaatacgctgtcccaggccatcatcctcaaaggtatcggccaaagtcagtacggactgggctcggcgttgtccgtatgcttcaccgtcgcctgcattctcgtcatcgccgcgcagaccggcattgccaacgccgtggaaaagaggttccaatgacaccgtctcagcgtgaactcgttcgcaaaatctttcgcaccatcgtggtgcttggcctggccctgatttgcgccgtgccactgtactatgtgatcgtcagctccttcaagacctcaatcgatatgatcaagaacccattggggcttccggagcagtggacgctggagaactacaaggaggccttcgccgacggcaccatcattcgtgcgttcgtcaacacgctgattgtcaccgtggtggcggtgctgctgcaggttctggtcggttcgatggccgcattcggcgtggtatacaagaaatccaagttcaccgccatcgtcggtggcgtactgatggtcaccttcgccattcctgtgcaggccacaatgctgccgctgtaccgcatggagtccgagaccggacttgtggattcgctgcttggcttgattgtgctgtatatgggctcgtgtgtgttctgctacttcctgatcgtcggctacatgaagtccctgccacaggaattgttcgaagcggccaaaatcgacggtgccggcccatggcgcatctactcgcgcatcgtgttgccgctgatcaccccaatattgaccaccgtcgtcgtattccaaaccatgggcacttggaacgacttcctcctgccgagtgtgttcctcagctccacggataaccagaccgtcgtgctgcaggtatacaacgccgtgcagcagttctccacgaactggcctctgttcatgaccatcacggtgcttgccctggttccggtgttcattttcttctgcttctgccagaagtggattgtctccgggttggttgccggctccgttaagggttgaggacgaaatgagatcagtcatgagtgacgtacagaatgttgcacagcaagccgctatcgaacgtgctgctgcagaagccggtgcctcaacggatttctctcaattcgctggaagttcgctgccgttcggcaatggccaggttcttctggatcaatccaccggtgctcccatcgcttttgtgaacgaagataatcccaatcgtcattatctgctggacgacagtgtctcttggcacacatcggaccagtattggggcagcggctatgtggtcactaccagtggtggctcgcagtggaacacgccgcaggtatatggcataaccaatggtctggaacagcagacgttcgcactgggcggtgcgggactcgccctggacgttacccgcagtagcggcgaacggctgaccgagcgttatgaatggcgcaacgtttcgaaccagccggtgaccatcacaggcttgggcatccagaccccattgaacgaccggtatccgggcgctcgcaaatcgttgagggaatgtgtgcatgcgcatatattcgcgggaggcgactggagctgggtgctggccgagccgatggacggccgcggtgcgcgcttggggctgatcgttacggaaggcgcaatcaatgcctatgccatccaatcgcgtaaccaggtcacgtattcggatatccgcgggcacatcgtgctgcaggtcaccgattatgcgctgaatcccgatgcattcggcgggcagccgaccatcacgctggagccgggggcctcgtatgcgctgacgtgggaactgggatggtatgcggacgaggatgcattcctggccgctacgattgctcctgcatcgttctcctcgttaagcgccactgtgggcgggcatatcgatatcgccacgaatcgtgctgttacggcgctggatgacggtcttaccgtcgaacggactgtgagcggagttcggttgacggccgaacaggcgggtacctaccaactgcagcttgtggatggagaccatcgtgcacataccgaagtactcttccacaagacgttgagggataccgtcaacgaccgtgcgcgatacatcctggagcatcaggtggcgtatgagcgcgtcggcgcgttggctggggccatcgtggctaccgatacccgcaccgggcagcatgtgctggattccagttgggatgactggtcggatggttccgagcgtatcgccatgccggtattgctacaacgtgcgctgaatcttgggctgcttgacgagtccctacgagagccggcccagcgtgccgccgatgcatggcgcacgttcgccgagtccgcgctcatcgacgccagcggcgcggtacgtcgcggctcggggctgccggaatccaaattcggaggccgtatctatgactgcccgtggattatcagtttcttcaccgaacattatctggccaccaaggatgcgcacgatctcgatatggcggtgaacatcgccgatcgggcggccgaaattggcggcgaacacttcctgagcatcgagttcgccgaatccagtgcggccttggcgcgtgtgcttaagcagaccgggcgaaccgaggagacccaacgtctgctcgatcgtgtggtggtcagtgcggactacttcctgggattgggtatcgacctgccctaccatgaggtgtcttacgaacagtccatcactgcgccgttggtgagtctgctgttggaagcgcatcgcattaccgggcgcgccgaatacctggatggtgccgtggagcgattggattggctattggcgttcagcggcccacagccggactcgcgtctctacggtgtggcgattcgacattgggatgggtattggttcggcatcaaccgacaattcggtgatgtgttccctcattattggtccacgttaaccgccgaagtgctggcacggttgccgcaagaaaggcgctccgcacgtaccgatgatttggccaaggcgattttcgaggccaatatggcgaactatggcgcggatggttccgccacgtgtgcctatgtgtttccctccaacgtcgatgggcggtccatgcatcaggccgacccattggccaatgatcaggactggcacctcaatatctggatgcgcatgattgccgaagagggcttctctgcgctctgagcccagcggcgctctattcggggcacgccattgcagcggtggcgtgcccttttggggatgctcgaatagggaagtggacaaggatttttcatttggtgccgtccgagctaattggctataaacgtatcgaacgtgcctgtaaccgatggagaaaacgtaaggaaagaattctcggaactttgtcatctgcctgaactgacctttagcagtcggatgccaatcagctgccgtatgacgtgtcggccacgcagtcatcgcaatcgttgctctccggtatgaggaccgccgcgactttttaagcgataccagagacataccgaggccggagccacgagacgagtaacagtttgcggtagatccccatcgctctactgcagagcatgaaccgccttatcaaaacgttcggccatcagattgatggaatgcatgtcaatgcggcgcatcgctgctcgagataatgcctgagataaggctgatcgcaatgtcggcaaccaatgatccgcatatttacggcttacaccgaacaaagacagactctcatcggacatcaatttatctatatcgacttcggtgtcacctaataatgacatctggtgtgagtcgggtagcgacggatcgaatggttcaggattcatgtcaaaagcgggtgccaattgccaggaattattcttacgcaaatacccgtggtttcgtagatggtcatcagtgttgccgatggccgcgccaaacattgctctccgccatagctctatggtgtctcctcctgccctacgcgtaaattctgctagatccaaccagtctccgccgtccccatctcttgcttccagcgcggtcattgcggatatataaggtaatcgctccattcgctcaactgatggtgcagacacgcgatcaaaacggtgagtcaatagcacggtccggcttctctcctccgaatcctttattgcaatgacgcgatgttcgggcactttgatgccggccatgttcgcgatttccaaggtgacggcttcccagccgataacatcccaatcatcgccgttcggtttcggaaatttggccagccacagcgcattacgatccgacaccgaagctttaggtcgtgcgcctccgagtgagccggttgcccgatacaacctgcgtaaggagacatcacttacctcgcggttctgttccaccgcatccgcagtgtccaataactccggcagctttgacagtacgggtactccttcatctcctgccgctggcttgccatcaacaatgaatcgaatggcaccctgtcttgtcagatcgttgacgccgaacaaatattccgactcgctgacacgcgtccgtttaagactgcgggaaaacacctttctgccccaacggtctggggcggaatccgaaaatggaccaagtccagagaagaagaatggggccaacgagcggggcatagatgggaagaggtcgaaggaatcactgctgattgtgtacgtcgaatcatagcggaacgataggtcgtcgccagtcgcatacaatgtgccggcaggagcttccattccaggccctagcgtaatcagtacagttgattcgatagtttttgccatcagggattcacctccgaacgcgcttcgggagttgttggccagcgcggagacgcccaagatcggtggaataggggtcgcatgcggctacgagtgtgtcagcaagttgcaacacgcgcgcgatggttaacagcgaatctgaccggacagccttgccttgctccagatttgacactgtggtcgggctgacaccagagcggtgtgctacatccgcaaccgtcaacatcagtagtttgcgctgtcgcgagaactgttcgcctaggatgcgtaaatcgcgtttggtggtggtgggcacatatttcattgcgatactccgagtgttataacatatagttttccatgaataaaatcatttattcactagtatactattgattatttgctatgcgataccggaatgaggaaggtttagcgtctcgatgtttctgctcatacgcaaaaggactttctgccaacaaatagccagaaagtcctttggtctcacgtgtatatgaggtttacaatcccggaatcaaaccaccgggtgggtcgagcgtgaggtattgctcctccagatcgatgtcgggcaccagttcctccacgaacggcaccaacgcggtcttctcgaccacatcctcgcccttggaattctggccggttaccaccggctcggtcaaacgaatcttgagcagtgactgagcgggggagtcgaccacatccaccactttgccgaccacttggccggcgggcagtcccagaccgttgccctcgactagacgggcctcaaggccaataagatccttgggataccattcgtcggcttcgagcatatcttctgcgtcgtcggcctcgccgtagagttcgacaccgtttagggcctcggcggcattgcggtcgtcgacgccctcaagcttgagaatccaacgatccttgaacgtgcgtgagccctcgacgatgtactcggtctcgccatcctggctgtagagcacggagtccggctcgaagcgccgctcgggatcatcggtgtacaggcgcacggtgacttcgcccttcaggccctgtgcgcggccaatacgagcgaccctcagcaactcgagctgctgagggtcgtcgtgcatgtcttgctgtgccatgctgtgaatcgttccttatcggttatcgacggacgtccatgatgtcaacgcggaccttgtgatcagacagtgcctgaatcacggtgcgaatcgcgttggcggtgcggccgccacggccgatcacacggccgatgtcttccgggttcacgcgtacgcgaagcagttcgccgcgcgcgttctcatgggacttgacggaaacatcgtcgggaaaatcaacgatgttcttgatgaggtgttccacagcctgtgcgagcatagctagcctttcgtttccgctcaggcctcagccggagcttcttcggcggcctcttcagccggggcttcctcagcggcggcagcggcttcggcttcagccttggccttggcggcagcttcggccttggcggccttcagcttctgagcctggttctcaacggccgcgatgcgggcctcggcgtccgggccagcctcaacggtcttcagggtgccttcggcaccttcaaggcccttgtacttctgccagtcgccggtgatgttcagcagcttgaagacgggctcggacggctgggcgccgacgccgagccagtactgagcgcggtcagacttgatctggatggtcgagggctgggtgttggggttgtaggtaccgatctcctcgatgaccttgccgtcacgcttcttgcgggaatcgacgaccaccacacggtagaaggcgtagaacttcttgccctgtcgcttcagacgaatcttggttgccaaaatggctctccttgtaatgctaggtgtgcgggttctcggtttgccatgtggggcatggccggccggaatccacgtgtcctcgcggctcggggtgtagagggcgccacgcgcgcgcgaataactggcccattatagcgcgcagggccggactgggcgtggcgccctgtggttgcggtgtggcgcgcaacattcccgggaatgttgcgcgaaaatgccggctatcgcagtgcaagcgttgcggtcagggccagatgatcagtgccctcgacctcaaacgacttcacgccggacggtttgagcccgggagtgaacagcacgtgatccagttcgatgcgcggccacttgagccagcgcgggaaggtgaggttcggtccggcggcttgagtcagactcgcgtccttgaatccggacttgagcaacgcgcggaagctcgggtgatcggtgctcgagttgagatcgcccataacgacgacgatattgcgattgctgacggattttgcacgggcgagttctcgcagacccagaatgccggccgaccaatccgcgcagccgcgcatcggcgatttcgggtgagccgaacaaagcgtcaccgtgcgattaccggaggttttgagggtgatggcgggaacatcggcggcagggatggagaccacgttgggcaccgctgcgctcggctcgtagcgggaatagatcacgttgaatccgccattatcggtctctttggcgtctccgaactgatggtaggggaggagttcgttgatgtcggcttcggtaagacgtgtgatgaggtcgtcggtgacttcctgcaaggccaatacgctgatattgcgttcgcgaatattgcgaatgatttcagcggcgtcggcgcgtccgtatcgacaattcatcgtcataaccgagaactggggcgagagtgtttcacgcattgtttcacggtgcccatcggggactgtttcgggtccttccttcggagtgtttgaggtgctcgatgtattgctgttatggctttttgacagcgtcggcgaagttgtttcacgggctgtttcacggtgggattctctgcgtttgccggctgggtcgattgacgtaccccagtagttgatgcgctgtgagctggcaatcagcgcgaccacaataagcgacgacatcgcagtccattcatgttgccatgcggcgaccgcggccagaatcatcaaaggaacccacagcagcggagtcagggcaatcatgtacggaagcggcatacgggcctcgagaccggcgggcagcgcgcttaaggccgtccataacagtgcgatgattgccaccgcgctgaagattgtcgtcatggaagttcctttcgaaatataaattgaaccgagatataacttggctcccctctgcgaggggagccaagttgtgagatcagcggccgaacagtccgccaaggcctccgccgaggttcggcggcagttcagtgccaccatcgacgttgcccatcatctgttcaaggccggcgggcagggccgggttctgcggcttcttggcgaaggcggaaccgccggtcgaaccggaggatttgccggccagcttgtcgcgcaatgccttctcctcggcctcgcgcttcatcggattgccggatttgccgcctttcttcttgttcttgcccttcttcttgccgccgcccatagccgggccgccgaagccggggatgccgccgcccatgccgccacgattggacatgcgcttcatcatctttgcggcctgctcgaaacgctgcagcaaagcgttcacctgagaaaccgtcacgccggaaccataggcgatacgggcgcggcgggaaccattgataatcgacggatcgcggcgctcggccggggtcatcgagcgaatgatcgcctcggtgcggtcgatttccttctcatcgaactgctcgagttccttgcggtgctgggccatgcccggaatcatgccgagcagcgacttcatcgagcccagcttgcgtacctgctgcagctgatcgaggaagtcgtccaagccgaaggagccttcggagattttctcggcggccttgcgggcctcttcctcatcgaactgcttctgcgcctgctcgatgagcgtcatgatgtcgcccatgtcgaggatgcgcgatgccatacgatccgggtggaagacctcgaagtccttcagaccctcgccagtggaagcgaacagaatcggcttgccggtaacggatgccacggacagcgcggcaccaccacgggcgtcgccatcgagcttggagagcaccacgccggtgaagtccacgccttcatcgaatgctttggcggtcttgaccgcgtcctgaccgatcatcgcgtcgatgacgaacaggatttcattgggctgcacgacgtcacggatatcgcgtgcctgcttcatcagctcctcgtccacgcccaagcgaccggcggtatcgatgatcaccgtgtcataaagcttctgcttggcgatttcgatggaatcgcgtgccaccttcaccgggtcaccggaagtctggcccggagcggccacagcctcgccgccgtcggactgcacgcccttctcgggggcgtagacgggcacgccggcgcgctcgccgaccacctgcagctgggtcacggcgttcggacgctgcaaatcggccgccaccagcagcggcgtatggccggaatccttgagccaatagccgagcttgccggccagcgtggttttaccggcaccctgaagacctgcgagcatgatgatcgtcggcgggttcttggcgaagttcagcgggcggtccacgccctgaccgagcacgtcggtgagctcctcattgacgatcttcaccacctgctgggcagggttgagcgcatcggacacctcggtgcccagtgcgcgctcgcgcaccttgccagtgaaggaacgcaccacgtcgagcgccacgtcggcgtcgagcagcgcgcggcggatttcgcggatcgtgccgtcgatatccgcttcggaaagcttgcccttgctcttcagacgcttgaacgcattcgagagcctatctgtcaaagaactaaatgctgccataatgggcaacagtctagccgccacgcgggaaattctatttgccgggcaacgattctgccgcccatatcggcgttgtgctgcgatggtgccgttcggttgccggcgttggcggaatcgtcaccagacatctagccggcgagtgtcctatcatccgctcgtggcgaagccaatcgagtgcttccgttaccatagagaatgtcaagaatcctgtgttttttggaatgcttacgctgttttgaaaatccctggacaccgcttatacgcagactgccgtgcgccctcgcgaacttaggtcaacgaccagacccgttgcgggccaacgcagacatgccgtgcaataaggaaggcccatcgatgcccgcccaaaaactccttgaacgcaaagctctgatcgttggcatagtcgtcaacgttcttcaggtattcgccggaatggctgtgttcttcatgactggccttaaggccatgttccttgatttctccttcaccgcaatctccgtcctttccggactggtggcggtgtacctttcgacgcgcacggtgcgtaccactgagcgtttccccaatggcctgttcgcgttggagcctatctacgcgatctgcaaggccatcttcaccatgtcgttgttggtgtattcgctgatcgacgtgtgccgagtggcttatgactacttcgtgttcgggtctggcgaacgcatcgaaaccggcccggtggtcatttacgagatcctgaccgtgattgtctgcttcagcctgtacatgtactatcggcgctcgaaccgtgccatcggcaactccagcaccatgctcaccgccgaatgcaaaagcacgctggtcgacggctcgatgtccttcggcatcggcgtgattgcggtattcctgatgctgctgccggctggcggaccgcttgacttcctgcattacaccggcgatttcttcatcaccgtggcgttggtggtgttgaccatccgcgaaccgttcagcgtgctgaaggaggcgttcgtggaattggtcggtggcgtgcatgacgacgacgagaccaatgcctacgtggaagccgaggcgcagcggcacctgcccgccaataccgagtatgagcagacgctgattttcaaaaccggcatgaactacacggtggacgtgtatttggccggcaccggcgagaccatcgatgtgtctgatctcatcgaacgcaagcgctcgttggaaaaggaactcgccaagcgcctgcacctcgtggacgtagacttcgttttcgactgatcggctggtttgatggggctttcgccatttcgaggggctgatttcgtcgttcccggaggtctacttccatttcaaggggctgcctaaacttcaaactgaaagtacaaatggcttaacgacaccgtcgttaagccatttgtagtgtgcctctacttgagcgtcagccccttgaaacggaagtagacctccggaatcggacaaatcagccccttgaaacgggaatatcgttgttcgatgtcgctaagtggctacttcaggctccaggtcgagccttgcaggccgtcttcgatggtgatgccggcctcggccagcgcatcgcgaatctgatcggccttggcaaagtccctagccttgcgggcttcggcacgggcattgagctgttcggtaataagcgcttccaatgcggcgtgctcgggggtctcggtcgtgccatcgctggcaccaccggcagctccggcagagacccacggttcggccagcggatccagtcccaacgtgtcgagcatggcgcgcacggcgagtagcgtctcacgcacctcggcctgcacggcctcggaatcggcgcgatcggcaagctgcgagagcagcgtattgccggaacgaatggcggtgaaaatcgcggcggtcgcgccggagacgttgacatcgtcgttcatcgcggccacgaaatcggtgggcaggtcatcggcggatatgccggtaacctcttcgcgggacggttgaccacccaaggccacgccggcacgctcgatgaagttcgagacgcggtcgtatgcggcctgagcctcgaccagtgcctgatcggaccattcgagcatcgaacgatattgcacggaacccagcgcgtaacgcaccacccaagcggagttctcagccagcacagacggcacggacaggccagtgccgagagacttcgacatcttctcgcccttggcggtcacccaagccgagtgcatccagcgtgcggcggacgggtagccagccgcacgggtctgggccatctcgttttcatggtgcgggaagcgcaggtccaagccgccgccgtgaatgtcgaatccgtcgcccagataacgatgggacatggcagagcattcgatatgccagcccggacgtcccacgccgaacggggttgaccagcgagcgtcctcggggtcggtatccttcggagctttccacagtgcaaagtcgcgcggatcatgcttgtcgggagaggcatcggccggatcgacggggttgtatttgtcgtcgccggtggcatccacggacgggcccatgcggtcggccacggcagctgcttcatcgacctcggcggtctgcttctggtgggtcagctcgccgtaatgcggccaggaggccacgtcgaagtacacgttgccggtgggcttgccatccgcatccgtgaccacatagccatggccgttgtcgagaatgcgctgaatcagatcgatcatgtccgacatatggccggtggcgcggggctccacggtgggcgtcagcacaccaagcgtgttgtacgcctcggtgaattcgcgctcatagtagtaggcgcgggcccaccagcgctgaccggcggttgcggccttgtcgagaatcttgtcgtcgatgtcggtcacattgcgtacgaacgtgaccttgtatccgagcttcaagaaccagcggcgcacgatgtcgaacgctacggcggcacggatatggccgatatgcggggaagactgcacggtggcgccacacacgtagatgccgacctcgcccggcttgagcggcacgaaatgactgacctgatgcgatgcggtgtcatacagattcaggccgtcggcggccttggctacatgcaccggcgtcaggctcgacggcataacggaagtgttgaaatcctgcggttcttggctgtttcccatagcccctaagcgtagggttggagccagacatgagacgtggcctatcggtgcatttttgtggggcggctgttcatgggttcggtgccgatcgacgacatggcttgttgttggcaacgattcaagtgcggaacggggcatcaaacggcggcgaaccattcgaaaatgacggtgttaacgcaaacggggaacgctcgtgtcacaataggagccatgtccacaccacaagtgctgattttgcaacatgtcccgtgggagcgccccgggcgtattctgtcgaccctcgaagatctcgggctcgatacggtgattatgaatattgccgacacgaagaagcccgatcttcccaacttcggtgaccttgccggtgtggtgattatgggcgggccgatgggcgcgctcgactatgacaagtatccgggattaaaagccgagggcaagctggccaaagcggccgtggccgtaggcaagccggtacttggcgtgtgcttgggccaccagattatcgccgctgcactcggtggccagctgcgtaagggtgatgcgccggagattggctttgggcccatcaagcgcgtggataggcacgacttcttctccatgtgggataagcagctgaacgtgctgcattggcataacgatgtagtcggtctacctgagggcgcccagctgctggcgcgctcctccgccaccaaggtgcaggcgttccgtctgggttccgcattgggcatgcagttccatctcgaagtgtgcggatccctgctggatgaatggcttgatgagccgagcatggtcaaggatctcaaggccgccggtggttccaaatcccagttgcgcgagcaattcgcccagtacgatcaaatgctgcagccgctcgccgagcaggtgttctccggcttcgccgcccgctgcaactcctactcccagacgctgagcaagtaggcggatgacaatgtgattgccgtatctcgttgcgcgacaattatcttctcccaccgcgtagtgaaactctcaccacgtagtgaattccccaccacgtggtgactcaaaatggcggtattccgctaaaagcaaatcttcgctaacaccgtcgtggggatttcaccgtgtggtgggtggtcgacatcgtggtggagacctcatcactgggcaagcatggcgctacattggtgagtcatgccgacttatgacattggactggaacacgtttcgctcgccttcgccaccaaaaccatcttcaccgatgtgacccaaggtgtattcgagggcgaccgtatcggcattgtcggtaagaacggcgatggcaaatccacgttgcttcacctgttccgcggcacccaggagccggactccggccgcgtgacgaagcgcggtggactcaccttcggcatgctcgaccagcgcgatccacttgacgacaacgccaccatccgcgaagccgcattggaaggccgcgcggactacgaatgggcgtccgacaacacctcgcgcgagatcgtggaagccctgctcggcggcatgagcctggacgccaaggtcggatccctgtccggcggccaacgtcgccgcgccgatctggctcgactgctgcttaaggactgggatattctcgcgctcgacgagcccaccaaccatcttgatgtggtcactatccactggttggccgagcacctgaagaaccgttggtccaaaggtcagggcgtattgctgctcgtcacccacgaccgttggttcttggacgaagtgtgcgaatccatgtgggaggttcacgacggcgtgattgagccgttcgaaggcggatattcggcatacatgctgcagcgcgtcgagcgcgatcgtcaggccgacgtgcgtgagacgaagcgccgcaatctggcacgcaaggagcttgcatggctgtcccgcggcgcccgcgctcgctccaccaagcagaagttccacgtcaaagccgcccgtgagctcatcgccgatgtgccgccgatgcgcaacacggttgagctcaagcaaatggccacctcccgccttggcaagcaggtggtcgacctcatcaacgtcacacagatttttgaacacacgcagggcatggccgagatagacccggacgtggcggcgctcgccgactcggcctcacgtgtggacgtggtgaacgccatgtatgccgaaccgcagctgcacggttccgtcgaggtggccgtcaccgatatggacgatccccgattggttgatgcgggtgtgcccgaagccatcgaggccgcggccaaggcgcgtgaagcggaggccaatgcgccgagcgacatcgagcgtgaggttcgccgccagaacaccggtggcgagaccatcggcagcgatgcccttgacgaggaagccgcgacgtccgccgcacgcaaagtcaccgtgtccggccgtgaaattctcgatgacgtgacatggctgatcggtccgggcgaccgtttcggcatcgtcggcgctaatggtgccggcaagtccacgctgctcaagctcatcgatggcacgcttaccccgaccgtgggccacgtgaacatcggcaagaccgtgaagttcgccgttctttcccagcgtttggacgagctggagaagctgggtcggtacaagattaaggaagtgctgagccgctataagcccagctacatcgtggagggtaaagaagttactccgggccagcttatggagcggcttggctttgagtccgcacagctgatgacgccgattcgtgacctgtccggcggccaaaagcgccgcatgcaattgctgctgattctgctggatgagccgaatgtgctcatcatggacgagcccggcaacgatttggatactgacatgctcgctgtaatggaagacctgctcgacacctggccgggtaccctgattgtggtttcccacgaccgttacctgcttgagcgcgtcactgaccagcagttcgcattgatcggcggcaaggtgcgccatctgcctggtggtgtgcaggattaccttgacatggttgaggacctcaagaacggcaaggggcttccggaggataaggccggttttgctgggactggtgggtcatcggccaagcgtggggcacagggtaagggttctgcggctgagtctctccctcagtcgacttcttcggagggaactcaagattcggctgagccaaagctgagcggcaaggcattccatgaggcgtccaagcgtgtgaacgccatcgagcgcaaacttgccaagctggaagagcagaaatccgacctcgaggcgcagatggccagccatgacccgagcgactacgaaggcctcaacaagctcaacgaacagctcaccgcagtcaacggcgaaagcgatgacctcgaagccgaatggctcgagctctccgaacagttggagtagccggggaacgcagtgtggtctgctgcgaagcgtgatttgctgtggggctccccctcagttacctccggtgacagctcccctcagagaggggagccaaagtgcatactgaactgcgccccgattgttggacgctgtttattaggatacaggctcagaccacggtggacgctctccggaattcctccggggtgcgtccaccgagtcgtatctggcgtcgtttggtgttccagtggatgatgtagtcgtcgagctcggccttgaaccgctcgtacgagtcgaattcgcggtcgcggtagaactcgtccttgagatggccgaacacctgttcggtggcggcgttgtccagacagttgcccttgcggctcatcgactgtcgtatgcccagttccccgagccgttcgcgccaccacgggtgccggtactgccatcccatgtccgagtgcaatacggggcttgcgccggcgggcagcttgggcgcgagcatggcgagcagacgcttctgctgttccatgtcgggatgccggctgacgtcccaggccatgatctccttgctggccatgtcatagaccggcgcgagataggccttggcgcctgcgaccttgaactcggtgacgtcggtgccgagcttggcgaacggcctgtcggcccggaagtcgcgcttgagcaggttcggcacccgttcgccgtcctcgcccctgtacgagctgtacttcctccaggggttcgccgcccgtatccggcacttgagccccatgcggcgcatgaccctgagcacggtcttggccgacaccctccgcccgaactcgtggaccaggcacatgtggatctgccggtgcccgcacccgttggcggtcctgccccagaccgccgcgatcagcggttcgaggtcggctcgcgtcacatgctccggatgagacaggtgacggtagtacgtggaccgagccaacccgctggccctcagcaagtggtcgagccggtgtccccgccctgcgagcgatcgcacgatggcgcttcgctcgcgcctcgcgacttccacgcccgcagggcgcgcactttttccaggtacgcgaccttcgccctgaggtaggcgacctcctcggcgagctcctgctcgcgcgtcggcttgggcttcggaccggatctcgcgcccctcggcctgcccttgggcctcgggcgcagggcctcgggcccgccggtacggtattcgcggcaccagcgctccaggggcgcgacgctcgcgattgcgtatttggccatgacctccgtcttggtcatgtcgttgtcgacgtggtcgcgggcggccgcgaccttcgtcccccagtcgtagctgcgtttgcccttcgcgcccatgaccgcgtcctctccgttggacctgtatttcatgatccatttttccgcggtctgcacgggcatcgcaagccggcgggcaaggaaatgcttgcccgcgccggccttgatgagccccagcgcctcgtgccggaacccgtcgtcgtaacgtttcctccgatcctcacgcatacgaaagaaccgcacctccgatcatcgaatctgaatttcctcagtccaacaatcggggtgcggttcataccgaactgccctccgttgattctatgagctgtccgttagcctttgtattcccaaggattgatgaattccacgccggtgccttcgaagtccttggtgttacgtgtggccacacttgctccccaagagcgggcaattgccgcaatcatggcatcttggatacttgtaggtttgcccctgcgctcgcgttcaatgaagatggttgcataattggcagctgcttgggtgtcgaatgcgaatgttctatctgctaaggtcataagctcaagcttgatggttgtgtccgtgtactttcgtcgtttgccctcaggcatttgacatattccggccaacaactcggcgacggtgatggcagtggtcgccaaattgcttgtatcttggtttctcagccaattggcaacgtgctcgtctggctgtttcttaatgatttcgctgatgacgttggtgtccaaaataatcatggttacgacctattcaaaggtcactggtggtcgggaatcatcaggatttcgttcaggcgctggaatctctccttcttcgagcccatcaaaatctattttttccatgaattcacggatctcgtcataaaaattggtctttcgtgtcatttcgtgtgccaccgtgccggccaaccattcttcaagaatggaccgcacctgagattccatggagcgattgttcttttcggccacttccttgagctgttgaatttgttcatcgggtatttttcggatggtcagtgttgccataatgcacctccttgttgctgtcataatgctagcaaatagtgctgtcattatgcatgcagatggggttgcgaggtgcgcatacaaaaagggcggatatgcgttgtgcatatccgccctttgggtttggtcttgcaagctccccccggatggagggaagccagagaaaatcagcgaccggtgacttcggagccgacgaccttttcgcttaaggcgtgcgggccacgggttacggcgactgcgccggaacgaaccagctcgatgacgccgtaatgctccagaagccccagtagagcgtcgatcttgccttcagcgccagtcgcctcgatggtcagcgattccgggttcacatccactacgcgcacgcggaacaggcgcacaatctccagtacgtcggaacggttggactgatcggcggccaccttgatcagcaccagctcgcgctccacggtggaattcgggtcaagttccacaatcttcagcacgtgcagcagcttgttgagctgcttgatgatctgctcgagcggcacagcctccacgtcggcggtcaccgtgacacgggagatgtccgggcgctcggtgggggagacggacagagagttgatgttgaacgcgcggcgggcgaacaagccggcgatgcgggccagcacacctgggcggttctccaccagaacagagagtgtatgacgctcggaaccgggacgagatgcaggatagttagtagccatgatgattctcctctcctcagtgctcgttcgcggcggtcgtggtctcgtgctcgaacacgccagtcgcatgttcgtccgggccggtgcctggagccggggtcccgccggtcagcggtttgataccgggcttgtagatcacctcatcgtttgaggcgcctgcggcaaccatcggccacaccatggcgtccttccatacgcggaaatcaatgagcaccggacggtcgttgatctggttcgccttctcgatggcggcaatcgcctcatcttcagtgaacgcgcggatgccgacacaaccataggcttcggccagcttgatgaagtcaggcacctcgatcggaaccgaattatcggccagttgcccggcaccatcggtaccgtgagcctcgccatccaacaggttggtctgcgagtagtggtgctcgtagaacagggtctgccactggcgaaccatgccgtacacggagttgttgaggattgcgatctttaccggagcgtggtccaagaatgcggccgccagctcttcggacgtcatctggaaggagccgtcgccatcaatcagccacaccggcttcttgccttcaaatttacgggcggaacccacggatgcgccgatggctgccggcaggccgtagcccatcgtgcccaagccaccggaggaaatccaggagtgctggttctcgaagtcaatgaactgcgaagcccacatctggtgctggcccacgccggtcacccagatggtggaggagtcggccagctcggagagcttcttgatgacccactgcggggccagcgagccgtcggtcggcttgtcccacgtcatcgggtattccttgcgccagccatcaattgccttccaccagggagccaggtttggcttgccctgaatggcttgcgtgcgctcgatttcaggaatcagatcgtccagcacggcggccacatcgcccacaatcggcacgtcgggctgacgattcttgccgatttccgccggatcgatatcgatgtggattacgcgggcggtgggggcgaaagcatccagcttgccggtcacgcgatcatcgaaacgggcgccaatagccacgagcagatcggcgcgctgcaccgcaccggtggcggcgatggtgccatgcatgcccagcatgccgaggttcttcgggtcggtgtccgggatgatgccgcgcgcgggcagggtggtgaccacgggggcgccggtcagatcggccagagccttgacctgagcgccggcgttggcacgggccgcgccgccgcccacgtacagcaccgggcggtaggactgggagaacagcttggcggcatcggatagtacgcggccgtgcgccttggtggtgggattgtagccgggcagaatcatgcgctgcggccatgaataatacatatcaccggtttgtgcggtcttggtcagatccactaccaccgggccggggcggccggtgctggcgatgtggtacgcctcggagagcacgcgaggaatatcctgcgcgcgggtcaccaggaaggaatgcttggacaccgggtaggtgatgcccacgatgtccgcctcctggaaggcgtcggtaccaatggcctgaacgcccacctggccggtgatgaccaccatcggcacggaatccatgttcgcgtcggcgatggcggtgaccacgttcgtggcacccgggccggaggtcaccaggcacacgcccaccttgccagtggccagcgcatagccctcggcggcatggccggcggcctgctcgtggcgcatgagcacgaaacggaacttcgtgctgtcgttgatctgatggtagacgggcaggatcgcgccgccggggataccgaagacgtcctcgacgccgagatcctccagcgaacgcaccagcgcctgggcgccggtcatcttctctccatcgacgatagtctgcttgtcggtggccgcaggggtcttcggcacgccgctgaatgcctgcaaaggcgtgggtaaagccatgattcctctcacctcgtaaatcaactgcgagcgtcggttggccgtagggtggaagccagacgctcacgtatgttccagccgcgtgtgccggtgcttgtggctccgacgcggctcgtcgctcgtgttggtatcagtctattcgtaaatccgacagccggcttacttagtccgcgtcttgagagcgtccagtgctttccatccggcttcggccgcggcaagctgtgctttgcgcttgctggagcccttgccggtgccgatgatttcgggattatcgcccaaagtgactttggcagtgaaaatctgtgcgtattcggggccggacacttccatgtggtacaccggctcggccttgcccagatgatgtgccttgacggtcagcgaggttttccagtcgagcgccgggccttcagtggccacttccgccaaggtgtcgtcaatgagccgatggatgaccttgcgggcctcgtcgataccgtgttccaggaaggtggcaccgataagcgattcgacgatgtcgcacagaatcgagttcttttcggcaccgccctgctcggcctcaccgtggcccagcagaatgtaggggcccactttgagcttggttttggcgatggcgctcagcgcgtcctccgagacggctttggcgcgcatcttggccagctgcccctcgttcatgtccgggtgaatggtgaacagcgtttcggtggtgaccagctccagcacggcatctcccaggaactcgagacgttcgtagttggacacgccggggtgctcatgcgagaaggagcgatgggtcaacgcttgcaccagcaggtcagggctgatggtggtgcccagcgcttccaacagttcattggccggagcttggcggtcagccgtttcttgctgtgtggtcttctcgctcatatgttcttcatccttcgcacgatgtgctgtgtgtattgagatttatgtgtaggtactgcaagcgctggtatgcggtggcctgtgctcgcggcccgggcaatcgagtgtgatatgcgaaggccccgccacccgtcgatggcagggccttctatatcaagccgttatcgcaggactcacttggtgtgagccggctggatggcggagcggtaggtgcggccgcggaaggaaccgcagctcgggcaggccatgtgcggcagagccggagcgccacagttcgggcagctcacggttgcggtagcggtggccttccagttcgcgcgacgcgagtgcgtgttagcgcgcgaggtcttgtacttaggcagtgccatttgagtatcctctatttcgttcgaacgattgagcttaagcgtccgttatcttaacgcatggctcgtacaaaactcaagtttcgtgtgccttactcgccctgctcggcctcaagctgggccttgagaccagccaaaccggcgaaacgaatatcttccatttcgtggtgatgatcggggttctcgttcagatcgatgccgcactgcgagcacaggcctttgcaatccggcttgcacagtggctgcagcggcagggattcgaccaacgtgtctcgaatcatcgcctcgatatccgcaaaagcgccgttttccagcagcggatacgtatcctctgattcgtcttcgccggcgatgatgtcgacttcctcatctttgccgtttttgctgccgctcttgccgcagcctttgtccgctgcggattcgtacgggaagaatacggtgacattcaccggccagtcctcgtcaatgggctttaaacagcgggtgcattcgctgacgaatggtgcgaccagtcggccggtaaaaatcagtccatccacgatggagtcgaatgagccggtaacgtgaaccgggtcaccctccttgatgccgacgatgtcgtcgccgataccgctcggggcggggaagtcggcgtcgatctccttggattttccggctcgtgaagcgatttgagccactgggatcgcccacagagaatcctcgactcgtgccatagttctgcctttcgttttttgctgcggcacagccgtgtgaggcgtatcgggtgttgtcttcgtcccgtgcgccgctatgccgcattcgtgaatgctgcagtgagtgtgctgctggttactgagcttcggggtagtcgttcagcgtcagcttgggcaactgctctccggccgagcgctgacgctcttccagcacgttcaaacctgcttgtacatcttgggtgagcttgccaagctgctgggacagaccctccataaccgtggtgcaatactggtcagcgccttgggtcaggtggtcggacttggcctgggcttgctcaagaatcgtgcgggccttctgacgggccaactcagtgacgttttcctgtcctgccaggaattgagcctgttcgttggcttccctgaccatatccgcggcgcggctctgggcggatgcgacgacggcgttggcctgtgtctgtgcggattccaggcggcgctcggcttcgcgcatcagtgcggaggcgcgttccagctgcaccggcaacagctttttcaattcagcaagctggctggtgaactcgtcgcgatccactttgaccgtgccgggcgagaacatgctggttttggcctcatcgagcatggattcaagccgatcgatgacgtcatacaccgtggtgaattctgcgcggctcttgttttccgccgagtcggcttgcagggtttcacgcagatcgggcagtgtgcccatattgaatgcggctgccttggtcggggccggtgcgggagccggcgcctctggggtcggtaccgcatcggttgcctcggtaggcggcaaatcgaccggtgcctcttcagtgggggcggtcgggaccggatccggggtggtcaagtcgacgtaaccagtgggatgttcatcactcatagttatcagtcctttgcttctcgttcctgtgccaaagcatcgctgagcatggggacgacgcaatcgggcaccatgccggtcacgtcgcctccgtggcgagccacgtctttgacaatggagctggaaatatgttcaagaatcggatcggcgggcagaaacagggtctcaatgccggcgagcttgcgattgaccaacgccatgcccagttcggcctcgtaatcgccgttctgacgcagtcctttgacgatgacggtggcgccgaccttctggcagtagtcggtgatcaggccatcggtggaggagacgacgacgttggtgcagccggctttctccagcgcgcggcgaattacctcgactcgcgtgctttcggaaaacatcggtgttttcgcggcattgacggccaccaccacgtgtacctcgtcaaagaatcgtgccgagcgctcgattacatccaagtgtccggcggtgacggggtcatacgagccggggcatactgcgatagtcatgccttctagcctaccgcgaatggtgtgcaatggtgcgcttcgtgcggccacacgttacatgcggagggtttcgcggtttgcgatgggaatctatgatgggatgcagttgaatcgtacagtacgaggaaagaagtgcactatgacttttgctgatctgttctccaatgacgccgaaccgctgcgcaaccccgaccagggtgccggaacctccgtgctggaacgtccggagaccaaggagtcgccggtgcgcgacgatggcggcgacgccgaccgctttgcacactatgtgtccaaggaccgtatcgcggaatcccgcgcgaccggccgtccggtggtggccctgtgcggcaaggtctgggtgcccaagcatgacccgtccaagtatccggtgtgcccggactgcaagcgcatctacgaagaaatgatgggctgatttttcgttcccgctggcgggagctgtcagcaaagctgactaagggtggttgtctcggcaagactacttggttcccctctctgagggggagctggctcgcgcagcgagactgaggggagcaacgagttcgcacccgttactcccctcagtcgtctacgatgacagctcccctcagcgaggggagccaggacgtttctaacgtgccgaaatctcgtcgatgagcttgagctcatcatcgctgaagtgggtgttcttcagcgcgccgatgttgtccagaatctgttgcggcttggaggcgccggccagcacggaagtcaccttgccgtcgtgcagcagccatgccaggctcatctcggccagcgtctggccgcgctcggaggccaggttgttcagatccatgacctgcttgtgtagtttctcggtcagcgcggaatcgttgaggaatcgcggatcgtgagccatgcggctgtcggccggaatgccgttgagatagcggttggtcagcaggccctgtgccagcgggcagaaggtgatgaggcccttgcccagcttgaaggcggtctctttcaggccgttcttttcaacggtgcgatcgaggatgttgtacttgttctggttgatgatgaacggcacgtgcagttctgccagaattgcggcggccttttccatggtcgagccgtcgtagttggacaggccagcgtacagcgctttgccggaattcacggcctgggccagtgctcccatggtctcctcgagtggcgtctccgggtccgggtggtggtggtagaagatgtccacgtaatcaaggccaaggcgttccagcgactggtcgagtgaagcgagcaggtacttgcggctgccgagatcgccgtaggggccggcccacatctcgtagccggccttggtggagatgatgagctcgtcgcggtggtgcttgaagtacttggtgagcagcaggccgcagttcttctcggcctggccgggttcggggccgtagttgttggccaggtcgaagtgggtgatgccgttgtcgaaggcggtgaagaccagggacttcatctggtcaaacggcgtgatgtcgccgaaattgtgccagaagccgagcgataccgccggcagcttgaggccggaggtgccggcgcggttataggtcatcgtgtcataacgatgcgggttgggggagtagacggcggttggctcgaacattgagtctccttgatgtgcttgaggcctgaaatctctattgtgctgcgcagccgtgtgccggatccgtgtgcggcacggatgcggtggcagttggttgcgtcgtcaggtatcatggttccagttaaagtgaactttaatgcaagcgactgtattgcttcggcgtgtcgcggctaagggcgaatcggttgcaccgtgcagcggaccgttcggaggactgcaaaagaacatatgcgcagcgggcatcaaggaggaaacaatgacctataccattcgtcaggtggctacccaattccacatgcaaccttccacgctgcgctactacgaagagcagggattgctgaccaacgtggaccgcaccgaaaccggccagcgcgtgtatgaggattgccatctcaaccgtctgcgtgcgatctgctgcttcaagaacgctggcatgaccattgatgatttgaagaagttcttcgtctatgagtccaatgagcccgagcatatcgacgaaattctggatttgcttgaatcccgtcgcgagtcgctggacgagcagcggcgcgcgcttgacgaagccgccatgcacgtgcagcgcaaactgcgctattacaccgacatcaagcatgcgattgattccggtggtgagatgcctgactgggccaactacaagacccgcgcgtattccatcgactgttagttatccgctaagccaccagtgccttgttcggcagcgcacggtcgagcacccagacaatcagcgatatcaccaggaaggccagcgccagcctgccgcaactgatgccgaatccctgccagccgagcttgtccaagttgatgaagtcgtaagggtacggactaccgccagccgcggggcccgaacccggccagatcgccgcgcgaatcagcacaaacgccaggtacgcggggaaatacatcaaccacgagaacatgtaatgacaacggaaccggcgatgcgggtcgaacagaaggaagtcgatcagtgccatgatcggggcgattttgtgcagcatcgtattggtcatgatgccaactacctgcggtacataatccgggttatccggcggcatcaggaagaacgccaccaatgcggtgacaatggcgtacaaggtcaggcagcccttgagccaggctggcggttggatgcccttgagcagggtggcagcgcctgcccacagcatcacgatgcccaacacaaagccggtctgaaacgtgaaatacacccaatactgcggtttcgaccatgcttcgtacgtgcccacaaagcacagtccggcaatcgtcagacgccatgatgtcacaatgaatctcatgctttctgagtgtagccagtctttcgggtggtgacagcactccccatgagaggcaattcggactacactgatggtcagtacaatcgaacgtaggaaaggccctgtcaatggtggattattcgccggctttgatgaccgacatgtacgaatacacgatgcttgacgccgcgctgaaagacggcaccgccaaccgtaagtgtgtgttcgaggtattcactcgccatctgcccgaaggccgccgttatggcgtggtggccggcaccggtcgtattcttgacgcgcttgagcacttccatctcgatgacgaagacctgaaattcctgtctgaccgccatgtggttagcccggagaccatcaagtggctggaaaacttccacttcgccggttcgattaagggctaccgtgaaggcgagatgttcttcccgaactccccgattctgcaggttgaaggcacgttcggcgaatgcacgctgctggagacgctgattctatctgttctgaactacgattccgccgtggcttcggcagcctcccgcatggtgtctgccgccaaggatcgtccgtgcatggatatgggtggccgccgcaccaacgagtgggctgccgtagccgctgcccgcgctgctgtggtgggcggattcaagggcaccgccaacctgcttgctgctcagttgtatggattgaaggcgattggcaccgcggcgcactgctttactttggtgcatgattccgagcgcgatgcctttgaatcgcagattgaagcattgggcaagaacaccacgctgctggtcgatacctacaacatcgaggaggccgtgaagaccgccgtcgaggttgccggccctgaactgggcggtgtgcgcatcgattccggtgacctggctgcaatggcccagcgcgtgcgcaatcaactggatgctttgggcgccacgaacaccactattaccgttaccaatgatttggatgagtatgcgctggcagctttgcaaaccgcgccggttgattcctatggcgtgggcaccatgctggtcaccggctccggtgctcccacctgcgctatggtgtacaagctcaccgagcgtgaaggcgcggatggcacgatggtgccggtgatgaagaagtcgaaggacaaggccactgtgcccggacgcaaacttgcgttccgctcttacgagtattcgctggccgaaaccgaacatgtgatctccggttccgaggagaagctggctggctatgtgtcagacccgacatggaagaacctgttggtcgactttgtaaatcacggtcagattgacggccaatggcaaggtcacgatgccatcgtggcggctcatgagtaccacgccacggctttggccgaattgcccatctccgcgcaaagccttatgaagggcgaaccggtgattcccacggagactacggttctctgacgagaaccttcatcttctcggaatccgtcgcagcacagccgctcccctcacctacaggcagcccactgggctgtctgcttaacggttcggccgcggagactacggttctctgacgagaacccgccgttgagttcgtgggacgaaatctgaaattcgccatttttggcgtattgtcccacatcagcgtgggacaatacgtacgtcaaacgtttgatatgcgagttgtcccaacatcacatcattaaaaacgttggaataatgccattctcgtttcagtatgaataacacgatgctgagtgggcgtgggacgatacgtcaaaaatccctaattttgcatgtcgtcccacgccatcatgaatctcagcagtcgatgggacgcaacgactccaccatttcacgggccgtgatggtgtaacgcggagggtggcgccacgtcgcctggcctcggctggcctgcggcctgcgatggcgtgatggtagtgaattacccgttgttaagacaacatcgttgcactcgcagcatagggcgggtggcgtatgctggggcgcatggttgaaatcaaagatatgctaggcgattgccagattattcgtgccgacggccgcaaggttgatgaactgcgtcctgtgcgcattacccgtcactttaccgatgcccctgaggggtcggtgcttattgaatgcggcaacacccgcgtgatgtgcaccgccacttttacgccgggggtgccccgctggcgcaaggattccggccttggctgggtcactgctgaatacgcgatgctgccgcgtgccacttccgagcgcactgatcgtgaatctgtgcgtggcaagattggcggtcgcactcatgagatcagccgtctgattggtcgctgcctgcgtggtgtcatcgatatgaaggcactgggcgagaaccagattcagcttgattgcgatgtgctgcaggccgatggcggcacccgtaccgcctctgtgaccggtgcatatgtggcgctggtcgatgcggtcaactgggcggagaagcaccaccatatcaaatctgcagacaaggtgttgaaggactatgtctccgccgtgtctgtaggcgtgattaacggcacgccgatgctggatttgccgtatatcgaagacagccaggccatgaccgatatgaacgtggccatgaccggctccggcacgttcattgagattcagggcactgccgaacatcgcccgttcaaccgtgccgaacttggcactctgcttgatttggccgaaaaaggcaacaaggaactgcaagcagcccagcgtgccgcattggcactggactgagtcgttagccattcgtcgtagacttccctcagtcagcgcgcataccatggctcccctctttaagaggagctgtcgctgaaggcgactgaggggactcgacacacatagcaaggaatccatcatgcaaatcgttgtcgccactcataacgaaggtaagctcgttgaaatccgccgcatccttgaggaggatctcggcccggccgccgccgacatcgaactggtgtctgccggcagccttcatcttcccgacccggtggaaaccggcgtgaccttccaagaaaacgccctgctcaaggcccgcgacgtggccagccgtaccggtttgcccgccatcgcggatgattccggcctcatcgttgacgtgatgggcaacgcccccggcatcctgtccgcccgctgggctggcgcccacggtcatgacaaggccaacaatgcactgctgctcgcacagatcgaagacatcccagatgccaaacgcaccgcccgcttccgttgcgccgcagctctggtggtgccggataccgaagctggtgccgacgtgaccggtggggtggcagatggtggcgcggccaccttgtcttctgcccacaccacggccgcggatggcggccccgctccgatctcggcacgatacgccatcgctagcgaaacagtggaactcggcgaaatgccgggcgtcattatccgtaagcctcgcggcgagcatggtttcggctacgacccgctgttcgtgcccgacgatcagccggctggccgtaccagcaccgagcctgactatgagggcgagccattgaccagcgccgaaatgactccagcggaaaagaatgcgatttcccatcgtggcaaggcgctcaaggtcttgattcccgcaatcgaagcgctactagccgactgaactgctgcctcctgcggcggagaccatagagaccttaatacatatcaattgagccggtggctccagatgcattctgggaccaccggctcaattgttcccgtcaacacacacggctacatatgcggtcacacgcccatcagtgcgtgcgccacggccatcatcaccaatgcgatcattgccgtaatcgccagcgagaagcccgcaagcttggcgttgcccagcaccttgtcggtgaacaacgtggagaatatggcaatcggtgcgagcgagcaaatcaccatcacggcgcggactgaagccgagaacggcagcaggaaccaggaaaccagtgcaaaggcgacgctgaacggcactcgccaggcaatcacggacagtacttccttgacgtcatgcttggactgcggcagatccatcagcatgcccaccatcagcatggacaccaaggcgttcgcgccgcttaatggctggcagattgaggcaatccagtcgggaatgggcacgttggccagcgtgacgacaatcatcaccagataggtatcgaacggtaccgacccaaagaagcttttagctatggtgcctagcagcgctcgccgggcgagtcgtttggcgtccttgtctttgggtttcgtgtacggcagggtgggtgcggcgccggcatgctgctcggcaagtgtcttgccgggacggatgtgcagcaattgctgggtgagcacgttggtgccagcggccaccataatgcaattgccgatatcgaacatagcggccggaaccactgcgcctgcgccccagaacgactgcaccacggggaacgagaaacagccgaggttgaagccggctccattgagcatcaggaatgcgcggtcggtcacattgcgtttgcgtgtggccagaaaaatgaacacgacggggagcgccgcgaacagaaaagcgaacagggagacccatagcagtgagacgtcgtgcggattggtagcaaacgaatagacgatggcccccggcagcacgatattgaactcggcggtctgcaatacgcggtaatccttctgtccgaacaatccgaagcgtttgaacaggtatccggcgagcatgattagcagcaggccgaccggcgtcagtatggcggacacaactctctcccttatctagcctctgatagattctattgtccgcgtatttcggatatcgcgcgatatcatcgccacaccgtggacgagtgggtgccggaagggcggaaacaggccgcaaaccatatgaaaaacagaatctctggctcaaccgttttcggtcttgaaccatcgaaaatctcatatcttccatcatatttacagcgggaatgatagaagaaaacctctcagaatcattggtatttcagtggttctgagaggtcttaaccagtgcgcgagatgggacttgaacccacacgtcaaagacacaggaacctaaatcctgcgcgtctaccaattccgccactcgcgcgtgcacgccgctcaacggcaccggctcgttcggaacctgtgcgtattgggcgatatgcaaaaccctaggtggacgaaccagcctagggtgttcgagccacttgtcagaatcgaactgacgacctgctcattacgagtgagccgctctaccgactgagctaaagtggcttggttcgcgggaggcatttcgccagccgtgcacaagaagtcaagtataaagtaaccccgcgaaaagtccaatcaagaatgattggtggtgtcgcacatgatttcgctggtatgcaggcgtcgaatctttcgcgacaagtgagtcgaattccgttgggaatggctttgtttagtcgtgactgcggcctgagattgcggtattatggttaacgcaacggtgcaatcgatgtcatttatctcaattgaataattttgttctttttatgtctgaatttgtgagtattctgtttggtgatacggagcgtgtgtgagctgtatgcacaggcgctccagtcactgatgaaaggaatggaatcctatggccatcaatccgcccgttgacgccacccagacccccgagtgggccgccctgcagaagcactatgacgagcttcagtccgagggtgtcagcctcaagaagtggttcgccgatgacgccgagcgcgtcgacaagctgtccttcgacgctggcgatctgcacttcgacctctccaagaacctgatcaagccggagaccctccagctgttcgccaacctcgccaaggccgtcaagcttgacgagcgcaccaaggctatgtactccggcgtgcacatcaacaacaccgaagaccgcgctgtgctgcacaccgctctgcgccgcccggttgaggatgagggcaagtacatcgttgacggtcaggacaccgtcaaggacgtgcgcgagaccctcgacaagatctacgcctttgctgacgacgttcgttccggcaagtggaccggtgtgaccggtcgcaagatcgagaccgtagtcaacatcggcatcggcggctccgacctgggtcccgtcatggtgtacgaagcgctgaagccgtacgccgacgctggcatctccgctcgctacatctccaacatcgatccgaacgacctggccgagaagaccaagggcctcgatccggagaccaccctgttcatcatcgtttccaagaccttcaccaccctggagaccctgaccaacgctcgcgaggcccgcacttggctgctcgaggagctcgccgccaacggcgccatcgccgagggtgatgaggctcagaaggccgaagccatcaagaagcacttcgtggccgtctccaccaatctggagaaggtcgaggagttcggcatcgatccgaacaacgcgttcggtttctggaactgggttggcggccgttactccgttgactccgccgtcggcacctccctggccgtggtcttcggcccggctcgtttcgaggagttcctgcacggcttccatgagatcgacgagtacttcgccaacaccccgttcgagaagaacgtcgtggtgctgctcggcatgctcaacgtctggtaccgcaacttcttcaaggttgcctctcacgccgtgctgccgtacgaccagtacctgcaccgcttcccggcctacctgcagcagctgaccatggagtccaacggcaagtctgtgcgttgggatggcacccccgttacctccgagaccggcgagatcttctggggcgagcccggcaccaacggccagcacgccttctaccagctgatccaccagggcacccagctcatcccggccgacttcatcgcgttcgtcaacaccccgaacccgaccaaggatggcgaccaggacgtgcacgagctgttcctgggcaactacttcgctcagaccaaggctctggcattcggcaagaccgctgacgaggttcgcgccgagggcactccggaagagatcgttccggcccgcgtgttctccggcaaccgtccgaccacctccatcttcggtgtggccctgaccccgttcgcactcggcgagctcatcgccctgtacgagcacatcaccttcgtggaaggcaccgtctggggcctcgactcctatgatcagtggggcgtcgagcttggcaagcagcttgccaagcagatcaccccggccatctcccaggacgacgaagccctcgccgcccaggacgcctccacccagagcctgatcaagttctaccgcgccaaccgcgagttctgatctccgctcctgcgtcgcttcaatcagaactcgcggttggcgcgccgcgctgtgttgtttgatggtcggtctggcgaccgtccatggcgcgagttctgattcgctagcgctcggtcagaatttgcgattcgcgcgaccgtagctgtgccgtttggtgaatggtctggcgaccattcacgtcgcgagttctgattcgccttcctcaagaaagttgactgaggaatcctgctaagggcccgacatctccggatgccgggccttttgcatatgcgggctgaagtctgtcagaggaattgaacgtggtcattccgctctgacgcctattcgcaggtataaaggtgtcttttacaaaggtcgcaggtattttgcgtcgagttagagcctcaaacgtcctccacattgacaccaaatacctgcaatcgtcttaatggtgtctttatacctgcaaatatgggtcgtaaatagacccgttatacctgcaaatacctgtaaaaatataagtgagaaggttataagctcgaaataagcttataaaacggcaccttttacctgcagacaaattcataaatggagctctcgaaataggttgcaggtataaaggcactatgtaggtcggttatcgcatcgcccgcatcgccagtgtgctcggtcgcctttatcgcgtccggtatcggaaatgatgggcgaatgccttggtgcgggaagcaacgctcaggcacccttattcgcctcatccagcgtcagcaggtcgtcgtcggcatcgtaatcgaacaattcgccgtaacggccccactccacggcgatggcgaactgctggtgtgcgtcctcgtcggaataccgcgcgtgcagcagatccagcatgagttcgccacgcagatgaccgcccgaggcgtgccgcaacgcatgttcgatattgcgtaccagcggcacatgctccatcgccagcgaggcgaacacctgcttggcgcgcagaatatccgcctgatgccaagcgtcgccagcctcggtgatttgtacatggccgtcgcgcacgacgattacatgcagcagcgtgccggcatccaccagcgggaacaggtcatcgacctcgaacgagagatccgatgccaggtcagccaagtcgatgccgtccggatgttcggcaaccacatccagcaagcccgccagtccgcccggtgtggcgttcggcaacggccggcccttgatcttctctaggggttcagccgtctgcaggttggtctcatccatggccggcacgttcgcactcgatgccgatagttcgggagcctcggccttgtgcgcgggctgcgcgggctgtgtggcctgcccggtcaaaatcgcatacagcttgtccaccatcgcctcgaatgccgcgctgtgacggtcgcgcgggcgcggcaaatcgacccgaacattggcgatcagatgtcccggatgcgagcccagcaccaccacacggtcggccatctccacggcctcttcaatgttgtgcgtaaccatcagcaccgatttgatgctgcgctgttcactcgaccacagcttgagcacttcctgacgaagattctcggcagtcagcacatccagtgcggagaacggctcatccataaacagtgcatccggctgcaacaccaatgcgcgcgcgatgcccacgcgctgccgcatgccgccggacaattccttgggatatgccgattcaaagccatccaggccaatcatgtcaatggcatccagcgccagtttggtgcgcttcgccttcggcacaccgcgtgccttgagacccaactccacattgtcttgcaccgtgagccacggcatcagtgcgaaggtttggaatacgagcgcgatgccgggattcggcccggtcaaagtctcgccgcgatacttgaccgtgccgctggtgggcttgaccagcccggccagtgcacgcaagaatgtggacttgccggcgcctgaacggcccagaatcgcaacgatctcgccctcgtagaggttgaatgagatgtcgtgcagcacggtgagctcggtgccgttgtccgccgtgaagcgctggctgatgtgccgtgcttcgatgatggtgctttgcggggtcaccgcccgcagcgaacgaatggtttcttttgcgatggtcatagtgttctccttaagtccttaatttttttggggggaggggctcagcccgcttcgcattcagctaccctccctgagggggagctgtcgccaaaggcgactgaggggagctccatataacgtcattaattcagtgcgaatcgatgttcagccagtcgctgcagcggattccagaacaggcggttgactgccacgacaaacacgctcatcacagccacgccgatgatggtgcgcacggtgtcgccgttctccgtggcctcggcaatgtaagcgcccagcccggaagcggtcaacgtgtgctgtccgtagctgacgatttccgaaacgattgacgcattccatgcgccgccggccgccgtgataccgcccgtgacccacgacccgaacactgccggaagaatcagctcgcgccatcgctgccaacgccccagctggaagctgtgtgccatttcacgcaaatcatcgggaatctggctggctccggcaatcacgttaaacaggatgtaccactgtgtgcctagcgccatcagcaggatgctgccccaattgatattcacgctgcacgccacaaaccagagcgtcacaaacgggaacgtgaagttcgaggggaagctggccagtacctgcacaatcggctgcatgaaccgcgagacccgtggattcatgccgattaaagccccaacaggcacccatatcaccgaacaaacaatggtgagcagcgccactcgcaggaaggtcagcatgccgagtgcgagcgcatgtcccaactcgtcaaagcccgcatcgcggtgaatcaccagcatgagctcgattaccccgaacgcgcttgccgccacgacgaccaccataaagagcacgtcaagtacgcggcttcgggtggactttgtctcaacgggccagcgtcctccggtgcggcccagcggccgggtcagcgtgtcgaacagctcgccgaccggctgaaagaggcggtcaagcatctcgtcgatatgagactggcggattatggtcagcaccgcactggtcttgcatactgcggactcgctttgtgtaatgcggaatttctcggcccacgcggtcagcggtttccagagcagcacgtcaatcagcagcacgactgccaccatcgtcacgatggcccagcagattgccgcgaggttctcctcggccgccgcctgcgccacaaaactgccgataccgggcaatgcatacgtgtgattgttgactgaaatcatctcggatgcggtcaggaagaaccagcccccgcccacgctcatcatgcagttccagagcagcggaatcattgcgtttggcacgtccagcgtccagaatcgctgccagcgggtaagcctcagggagcgggccgcctcatcgagttcgcgcggctcgctggtcagggaccgggtgaacgagaacgccatattccatgcctgactggtgaagatggcgaaaatcgacgcggcttccacacccagcatcgaaccggggaacagcaccatccaaatagtgatggtggcggaaagaaagcccagaatcggcaccgactgcaggatatccagcagcggaatcagcacgcggctgagcctgcgacagcgcgcggccgccgtgccgtacacaaacgtgaacaccaatgagaagaacagcgccacgaacatacggaatactgaacgcagcgcgtaatacggcaggtcggcaatattcgtactcaccgatgacggcacgcctttcgggccggtgggctcgccgatggccggcagaatccaggcgatcaagccgaacagtgccaaaatgccggcgatgaccagcgcgtcggcggcaagacgcacggcgaacggttggtggtcggccgaggaagtggaggggtttcgtgctggcgagcttgggcgcatggcggcatggttgaacgaaaacatggtcatggaagacctccctatgcataggaaagacaaattatgcaagggttatccggggtgggcgtccttggtccatctcagcgaggggagccaaggagcgatacgggcaggagcccgacttgacggataacggaataacgagacaagacatcatcaccgcaacaactatgactgttgccagcggcggaactactggaataatcaccgtccatcggactctcacctccttgccgtcgtgcgctcgcggcgcaaaaccataccgtcgtcggtatccttgcgaccagcaggaggggcggaaagtattcgaatccgccgattcgagccatcgttcaagctttagcatcgcagggcggtggagttgcgttagttcatgccttgatccgacaagaactgctgaccagcgtgcagtgtctccactgttagcggcagcaacccatatccctgcggtagcctcgcctaccgacgctctcaagataatgcccgaccgcaagcctgtcaactatgtggttgctgggcgagttcacagcgagtcatccccgtcagtcatgtcgccaacgtttgcgttgtttcccggcgtccgtgtgtatgcgttccgacgaatagggcgcatacacacggacgttttgatgggctgaaacgtccgtatgtatgtgaggggttcgttgggccacatacttgcggacgtttcgcggcatatcaaggaggcagtacgccgtgcatatggtgggcgggtgctgcgggtcttcaatcggctgtcctccgtaatccgtaaaataatcgattgctgtgtcgagaaacgggccgccgcataagcccgcgtctccatgagtccagtccgaacggctgagaagcccgactttcggcggattgacaggcttcccgagggcaaacccgaaggataacaagaacaggccaccagccatgcagctgccaaaggcgagcggcatgagcgcgacggatggccccaacctggggctgatatgcggcagcactgaaggaacaacaatggttaacgctattgaggcttttgacgccaagcacatgaagccggccgaggaaatcccggctttccgtcccggcgataccgtcgacgtgaacgtgaagattcaggaaggcaacaactcccgtatccagaccttcaccggtgtggtgatcgctcgtaagggtgccggcgttcgcgagaccttcatcgtccgcaagatcagctttggcactggtgtggagcgccgcttccctctgcactccccgtccatcgactccatcaagctcgtgcgtcgtggccgcgttcgtcgcgccaagctgtactacctgcgcgctctgcgcggtaaggccgctcgtatcgtcgagcgtcgcgacaactccgccaagtgagtcgtcacacaggtttgatcgcgcagccgatattcggttcacgcaaataaaccgtgaaattcagctcggaaccgttcgggttccgggctgttttcgttttgctcgcgtatgatggacgctcgccggcaacacgaccatgcccggcgttatgaatcgcaaggagacaccatgcaggacgatcaggacaacggtgaatccccggcccttgacactctggaaatctggaatgggtcgagcactgcggaatccgcgactgatgagcctcttgccacccgctccgctgcatacgatttttccggcgacgatccggctgattccggtgcttaccagcctccattggacgatgatgctcgtgactcgcggaccttccaggtggcggaccacggtgtcgcgttgtctccggttcctcccgcgcccatccgctcttctcgcagttcgcgggccaagcatgccgattctgcggcggcgcgaacgggtgacgatcgattcacgctgcgtgatttcgcgatttggtgtggcacgcccatcctcatcgtgctgttggtgcgcatcttcctcgtcggcttctatgagattccttctcgctcgatgatggatacttttgtacccggcgatcgtgtgatgaccagcaaaatcttcaatctgcagcgcggtgatgtggtggtgttcaaggatcccaacaactggctgaatgaggagcaaagcaacgccatcggtggcggattcctgatcaaacgactgattggcatgcccggcgatgtgatcgagtgcaaaggggccggtcagccaatcactatcaatggtgtggagattgacgaatcatcgtacattcgcccgggagtagagccgagcgccttcccgttttccgtgaccgtcacggaagggcatgtgtttgttatgggcgacaaccgctccaattcagccgattcccgttaccatcagaacgataatgaccatggcttggttcccattgatgacgtggtgggcacgggtctggcgatttactggccgattaaccatatcgggcttctggcatctcaccatgatgtgttcaaggacgttcccgacgcgtcgtccggttccccgtcctgagcggcgccttacctgtgaagcgaaatgatgattaccccaacgcttgatcttgaacgaagccttgcctcccaagactatgaccttattgttggctttgacgaagttggccgcggcgcgttggccggcccggtcatggtcgggtgcgctgccatttgggctcgtgatttgaaaccggatgccgatggcgaattggctcaggccgatggttctgccgcctcttcgcgtgtgtccggtgacaatggcaccgatgcaggcgtgatcaccccggatcccgctccatatctgtccgtacctgccggtgtggccgattccaaaatgttgaccgagcaccggcgtgaagccattttcgatgagttgtgcagttggtgcgctgcctatgccgtcggacaggccagcaatgccgaaatcgatgagtggggcattacctatgcgctcggcgtggccgctttgcgtgcactcaatcaggtcgagcgtgaccttggtgtgggaagcgaatttggctcccctcgggaggggagctgcctcgcggcgactgaggggaggcctttgccgagccgaaggcccatcaccatcggcgccattctcgatggccccagcgattacatcaccaaggccctcaacacctttgacgctccggatgtgccgatcccggccgacgtgaccaccaaagtcaagggcgaccagcattgtgccaccgtggcgactgctgcggttatcgcaaaagtcacccgtgaccggctgatggtctccatcgcgcagggcaatccgcgctatgccgcctatgagtgggatcacaacaagggctacggttccgcggctcatcgtgcggccatcgccgagtatgggccgactccactgcatcgcacttcatggcatttgacctgatgttgcggattgccatgcagcgcagtggccccagaccgattcgcgacacgacaatgtgagcgctcacgcgaaatcgcctcaggcgcgctaaagtcaataataaataaggtgcagcacggccgggcacggaattcggccgccagcggggaggctcaggcagtatggtgaccagccgcaaaccaaacaagcgcccatccatgttcgaggtggccaaactcgccggggtcagtcaccagaccgtatcccgtgtgatcaacgattcgccggatgtgtctgacgccacgcgtgcccgtgtgcaggccgccattgacgagcttggatatcgtccctccaattccgctcgtgccttggcctcccgccgttcacgtactatcggtttgatcgctggcggcctgaagttctttggtctgatttccgccattacctccatcgaatctatcgcccgcgaacatggactgttcatgagcgtgatgatggtgcatgagtctctgtgcacgcagtccgacttcgacaatctgtgcgacaccttcaatgagcagaacgttgacgccttcattttcctgaccccgactgatgtgatgttcgctgccgcctgccgtgcgcgcgtcaaccagccgcgtgtgattgtgacctccacccacggccagatgaccgtgcgcgaggggatgagcctgatttccactgcaaacaaacgccgtacggcgatggtcggcatcgatcagtggggtgcgatggccaaggtggtgagtctgctgggggagtacggccataagtcagccctgtacttcgctggcccgaacgagtggcgtgacgcccatactcgccttgacgcttggcgcaagctggccgcggcccgatctattgactcgcaaatcgtgcgctgtcacacttgggatgccgatgaggcatatgcgcatatgaatcatttgttggacgagtatggtcgcactggtgtgccgctgcccaccgcagttgttgccgcgaacgacaatcaggccgttggcgttgtgcgctcgctacatgagcatagcctgcggattccgcaggatatcagcgtggttggcttcgatgacatggccggtatggataacctgtatccgccgctgactaccgtgcaccctgatttcgaggggctcggcgtggccgccatgcgtgagacgctgcgactgttgggggaggggacggaaccgacgttcctgtcccagcagcatggcgtggggttgattcccgctgagatgtgtgcccgtcgttccctcggtcccgccccgcggcggtagaacagcggattagctttttttggggggcattctctcggtcaaaccgctattttgctgtgctgagtgccgttcagcggggtggattatcggtttgctcgtggttttgctttgctgagtgccgttcagcggggcttatttcccggttgctggtggttttgcttcgctggagggcgtgccggttggcccgttccgcctcgtcggctccgaggccatcggtgagggcgtcatcgagaccctgaagaagtacccgaagtccccggctgtcctcatgcagaaccatggcccgcaacaagcggacgttcagtggccataacgcagcattccttcgtctcgataaatattgccgccactgtatcgaattgatgttaaccgtcaaaccaatggcagcttgagcaggtaagtccagatggtgacgtcgatggagactgtgaaatcacctccaagatgggcggtggtgccacgtggcggtatcggtaagtgcttacctacaaaaatggaagaggaccggcgcggggcctcttccattatcagattggtcagattagggaacggtggctcaccgcttgccgttatagatttcgctgtcgatcgcatcggcgaacacgcggttgacagccgggcgcaccactttgagggacggtgtcaggcacttgttctcctgcgtgaattgcgtatccaatacggcgaacttgcgcacggactcggcgcgcgaaaccgtcgcgttcgctttatccacgtactgctggatctcttcgcgcactgcggcgttcgtggccagacggtcaatcggcgtctccgtggacagtccgtgtgcgggcagccagatggccagcgactccgggtcgagcgtcaccagcgcgccgatgaacgggcgctggtcgcccaccaccacgcaatgctccacgatcgggcacttggcgatctcctcctccagcgggatgggggagacgttcttgccgccggcggtgataataatgtccttgatgcggccggtgatgatgatgcggccctcgtcatcaatctcggccaaatcgccggtcctgagccagccgtcggcggtgaacgcctcggccgttttctcgggcagattatggtagccgcggaacacgttcgggcccttgacctgcagctcgccctcatcggaaatacgaatcgaggagccgggagcgggctggcccaccgtgccgatcacattgtcggtcacgcgtgtggcggcgaacggggcggcggtttcggtcatgccgtagccctggatcatcggcagtccgatgccgttgtagaaatgcgccagatcaagcgacagcggcgctccgccgcaagccacgtacttgatcttcgggcccagagcgccacgaaccgtgcggtagacgagcgtctcgtacttggcgcgctcggcgatctcggcaaacgtatgctgctcgcccgcctgctccttgcggctccagacgcgcgctgcctcggcggccttcaagaacaggcgacccttccagccggcgccggccttgtgcgaggcggcgttgtacaccttctcgaacacacgcggcacacccagcaggtaggtcggctcaaaggaacgcagatccggcagcagcgacttggtgtccggcaggtagccgaccacgccgtcgtcggaggcgatggaggcgtactggatgaatcgcgcgaagcagtgggccaacggcaggaagagcagcaatcgcgggtgatcgtcgagaaccacctcatgcagcgcctgcgaggcggcgatggtaatggacacgaagttcttgtgggtcagctccgcacccttcgggttgccggtggagccagaggtatacacgatggtggccaggtcattggtgcgtacggtggccacgtgctcgtccagctcttcgtcggagacagccacgccgaggccttccaaagcacccagtgcgttgccgtcaatcataagaatctgcttcaacgtggggcagtggtccttgaccgaatcgagccggtcatagcgttcgcggttgtcggcaaaggccagcttgaccgcggaatcgttcatgatgcgctgggcttgcggggcggagtcagtgtcgtaaatcggcacgctcaccgcgcccactgcagccagcgcgaagtcgaggatgccccattcaaggcgggtggaggagaagatagtgaccgcgtcacctttggtgatgcccaaagcgatgagacccttggcggcagagaccacacgctcgtggaattcgccggtggtgacgttctgccaacgccccgggccgattttcttggctgcgattaccgtgtcggcaccggtgcgggccagtcggtcggtgagcagtgaatagatggtttggtcatcgcggatctcgatggattcgccgggcgtggtgtattcggtaagcatacggccgttattccttacaaacatgatggcgggttgacaattcgagccattctggcaacataggttacgcttgcgtaagatacggcgcgttgtgcgcactgaaaaagttgcgcggatgcttttgtcggttgtctacaagggcgactgcagaagtgcgctgtcactgtccgtcatcggttgtccagaaccgttgatgtattgccagtcgcctggcgccgtgcgagtaacacagtgcatcaattgtgtaagtggcttggcgcaatttgtatgaaagataacggtttgacaacgatttgccacaaagtctcatttaggggtccgtacgggctgggggcggcatcgagctcgtgttcaccgtggtgggcatgtacctgattgataccgccggccgtaagaagcttatggctgtcggctccggcctcatggtgctgttcgcgcttggcatctccttctcctacgcgaacaactaccagctgctcatgctcatcttcgtgatgtgcttcacttcctgcttcgccttctccatgggcccgattccgtggattatgatcccggagctcttccccacctatctgcgtggccgcgccaccggtatctgcatcgtgtttctgtaggccactaactgggccatcggccagttcaccccgatgctgatcagctccatcggcggcatgggcaccttcctcgtgtttgcctgcaccaacctgatctgcttcctcggcgtggtcaccttcgtgcctgagatcaaggacaagacgctggaagagatcgccgagctgtggaagccgaaggacgagaagcagtccaacgcccagctcgaagtggtgcgtgccaccgccgaccccaagtaggccgagtccgacatcaaggccgccgaggccgagctggcccgcgctcgcccgtgccaaggagcgtgccatcgtcaccaaggccgcagccgaagcgctggtcaacgcgcagaagcagcactgatccccagctgcttgcttgctctgtgtgaatagccgtttgtagcgtaattttcttcggaaagttgcgcgcagacggcttttttcatgcctcttttgcatggaataggtgaagagcaaccgccgccagagggcgttggcgcagtcacacgggccggtttcgcttcgtgggggtgcctacttccgtttcaaggggcggatttggcctttgccggaggtctatctccgcttcaaggggctgatgcccaagtagaaactgacccaaaatggcggaatgacgttggtgtaaagccgttactacttgcggtttcatggatcagcagccccttgaaacggagatagacctccggagacaccgaaatccgccccttgaaacggagataggccattgagcagtggaatcggtgccttgtaactgtgaaaacgggatttatggctgtggttgcgacctcgactgtggccggggcatggctgtgggtgtggacgtggccgcgactgtgcgatgccgggcaaatacgcaaattctattttcaggaaaagagtgctccgcattgtgcggattcgtattcgggaacggaaatttggtgtgacggttgtctcagtcgaaggtctggcgtgtatatgcgcttttgcctagggtaataggattgcgcgcaatgtgccccaccggtgtgtatgggtatgcgatcggtggcacgcgcgactggacgtatgacgagacctactgcaataacgcggcagtcaacacggcgaggggaaacgaaccatgttcgacaaacgactgttccaattggcgcccggcttgaaaaaactcatagccggcaaagtggcactgatgtgggtaggtctgtttgccaacattggttttatgctgtcgctggtaatgctgctgaacagcttgctggccgctgtggcaccgccgctgctccaatgcggcggcacttcgcaaggcgtggcctgccccgtgccgttgtctgatcagcacggcgcggatgtgctgcccatggctggcgacgtcatgatttacgcgctgcttgctctggtctgcatagtggttcggtacacggccaccacgcatgccacccgcctcggcaccgaagccgccgagcgggtcaaactggctttgcgatccaagctgtaccgcaaaatggtggcactcggcccgtcctacaaaacccgcatcaagacctcggatgtggtgcaatccgccggcgaaggtgttgaacagattcaaagcttctttgaactgttcctgccgcagctcttctatgcgattcttgcgccaatcaccttgttcgtggccattgcgccgattaacgtgcccgctgctgccgtcatgctggtctgcgcgccgctcatcatcatcgtgaccggcatcgtctccatgaccgccgcccgcgccttcaagaagtactgggtatgctacaccgatatgggcgccgcgttcctcgacaatctccaaggccttgagaccctgaaaaacttcgacgctgacgagcgcgccgccatcgagatggacaagaaagctgaaggcttccgcgtgatgaccatgcgggtgttgcagattcagttgcgttcgctgaccgccatggacatagtggcctacggcggtgctgcggccggcgtcggtgtggcgttatggcaatacgcgcatattggcgatgcttttgccaatggtgcgtccggctggtcgccaatcgcactggcctcacatctgcctggtgtgcttgcctacgcggcatacggcctgcactatctcattccgttcggggtgggctgcccgctgtctcttaccggtctgctgttcattgtgctgctgtccgccgaattctttattcccatgcgtcagcttggctcgttcttccacgtggcgatgaacggcatgacctccaccaagcgcatcttcgctctgctggacaccccggagcccgagcatggcacggcaactctgccggccaacgattccgattccgctgacgacggtctgacggtccgcttcgatcacgtcggctattcctatgatgatgccgggcatggcgactccaagtccgcatccgcaaaggccgataagcaaggtgaaaccagccccaattccgccgtcgctcctgcgatcaccaacatcaccttcgccgcacagcccggtcagttcaccgccattgttggcatctccggttccggcaagtccacggccgcctcgctgcttgccggtacactggccggttaccgaggttcgctcacgctgaacggcgtcgaggtatccgatttgtcaggcgaaacaccggctggagccgtcactgtgattggtgccagcagccatctgtttgcgggcacattgcgcgagaatcttctgatggccttgcccgatgacgagattcctgattcgccggattccgtggactcccgtctgtggtccgcactcgagcaggcgcgcattgccgatttcgtgcacgcgcagccgaacggactggacatgccgattgagtccgatgccgccaacctgtccggcggccagcgccagcgcatcgccatcgcccgcgcgctcctgcatgattcgccggtatttgtgttcgatgaggcgaccagcagcgttgacgtggaatccgaagagctgatcttggatacaattcgcgaattggcacaatcccgcggcaagacagttattatgatcacccatcgcatggccaacgccgaacacgctgaccaagtggtggtgctcgaacacggcaagtcggttgagaggggcgcccataccgagctgatgacggcggacggcgtctacgccaagctgtttgccacgcaggcagatattgagaacttcgaagaaggccatgctcggcgtgtgctgcaggttggttcccgcaagcaggagctgtccgacgacagtcggactgagggtggcgcagcgcgtgtaagcgcagaggcgggtatgacggttgaccacctgcagtcagctttgccgacggcttccgctggcgggagtgagcaggcctcggctgagactccggctggtgctgcaaatagcgattcgtcttccaaaatgagcacattccaagtgatcaggcgactgcttaaggaagcccgaccgctggcaggactgatggcagtggcctccaccgccggcaccatcggccatctttcgtccaccttcctgcccgtgttcggcattatcgcggcatttgcacttaccggtaatccggtgtggggcatgggtgttgcgcccgccgtcatcatgatgattatctgcgctcttctgcgtggtatcacccgatacgtcgaacaatatctgaaccacaatgtggcattccatctgctcgcactcttccgttccaaggcgttcgccgcgttgcgcagactggcgccggccaagctcgcgggcaaaggtaagggcaaccttatcgccatgttgaccaccgatgtggaactgcttgagatcttctttgcccacaccatcagtccggtggccatcgcggtaacctccaccatcatctacacgattgtggccgccaccctaagcccatggatggcgctggcgttgattgctgcccacctggttatcggcatccttgtgccgcgattctttgccaccggcgtacataaccttggccctgccatccgtggcgctgccggaaaactcgacaatgtgatgctcgatgacatgcgtggcctggacgaaatcatccgatttggctgcggcgaggaacgtgcgcaggccatcgaggaccgtacccatgcgttgtggaaggatcacgccaaactcagcaaggtcaacggccgtttcaccggaatcagcggactcttggtggctgtgctcgcagcggctttggtcgccgtggctattgcctgtgccggcgcgaacccgcagagcattccggctctgattgccgccttcgtgctgttcgccagctcgttcggaccgactttggcgctcaccgccttgcccgctaacctgactcagacctttgcgtccgctagccgactgttcggactgatggatgaggtgcccgctgtgaccgagaacggcactgttgtgccgcaggagtatatgggcatgcgtcttgatgacgtcacctttgcatatgcgggggagcacgaagtcttgtccgacttctcgcttgacgtgccgcagcatggcgtgctgggtatccaggggccgtccggccggggcaagtccaccatgctcaagctgctgctgcgctactgggatccgcagcgcggtcaggtgacgttgtccggcacgccgctgcccgaggtcgatgtgcatgctcgccgacgtattcaggccatgatgagccaggaaacccacctgtttgatggctctatccgagacaatctgctgattgctttgcctgagtccgaggttgaagctgcaaatgttgcaggcaatggggaagtgggtgccaagaccgttgattcccgacagcagcggttggcggcgcaatcggcagagggcgatgccgttcaggtggcagcatctgacggtctcgacgctcgtttgcgtcaggctctcgccaaggcctccgtgcttgatctcattgattccttgcccgatggccttgatactcaggtaggcgagctgggcgaccgtctatccgaaggtgaacgccagcgtatcggtttggctcgtgtgttcctgcgcaatgctgatctggtgcttttcgacgagccgaccagtcgtttggatgctttgaacgaggctattattctacgttccattcacgctatggccgtgggtgagcagcatgcagacaaggagcgcggcgcggctgtggtgctggtctcccaccgcgaatccgctatgcgcattgctgatgcggtactcaatctgtaactgcctgtaactacgcgggaatcacatcgcattgcgttacgttaccgcgttgcattgcggttcctcgcgggtggcggcgatgccatctccggttgtcattgcgttgctgcgtttgtgttgcgatatgtgatgcggcaacgcagcaatgcggcaatgcaatgtgatgtggcaacgcggcaacgtagcgatgcaataacgcggcaacatggcaacatggcaatgcagtaacgcaacgcagcattcacgccttgatcaaagcgccgatgacgagcgctttccgcagccccgggcggaacaggtcgtgaaattcatgcgacatttcggtttcgagtttgaccgatgcatggatgtcgtcagtgcgaaggcgtgcctgttcggtgccgatgatgtgttcgagcaccgcgaatccctcttcggttctgccggcttgaatgaggaatcgtgggctttccggtgctcgcaccatggagagcaggaacgcggcggccggaatcgcacccagccccagcatccaacgccaaccggtgttgacatcccagcttctggaaccgtaggaggcgatgatgtagttgatgacattggtcaggaagatgccgcataccgcgaggagctgatagggaaaggcagacagaccgcggatattggccggcgcttaaggccagaccgaacgtatatttgcctgattcgtgagtacgtatggttgttcccaagggattgcgctgcttggaagcagcttgaaacaggccctccatgtgctcttcctctcaatacagctatgggggtgcctgttcatactggtcagattcttgtcatatggcgttgaatatctacaaatgtgggcattagtgaggcggctgagtggtggaatcgcgccgtggtgtgtggtgttggagactcacgagcatgctacgcgttatttggtggtgtgctgagagtcgggacctactcacgttgggggaggggagaagagcctctgagacaagtcgctgttcgactggagatttgctcacgtggaaagcgtggaaaaggcgagaaaatcaggcgtgttgggtgattttgacaaattggtacacaggtgtatcatcttaggtattggtacacgggtgtaccaaagaaaacaccccaaggaaaggtggccagaggagacttcgcaagcggccaaacgaattgaaatccaacgcagcagtcgattcgtttttggcaatcggaaggcagccaaagacagccggaagataaccgagaagtaaccggacgaaaaccggaagccagtcggaagaaagccaaccacccgcaagccaactccaatggtccaggaggagataacatgcgcaacaccaagaaggtcatcgcggcaacggcagccgtggccacgctcgtcggtctcgccgcctgcggcagcagcaacgacaacagcgtcaacaagggtgacgccgacaaggccgaactcgtgttctggggctgggattccggcaactcgatgaaggaaatcctcgctgacttcgagaaggccaaccccggcatcaccgtcaagtttaacaacaccggcaccgccgagaagacctccaccgcgctctccaacgccatcgccgccggcaatggcgccccggatgtcgtgatgctcgaagatccgaccgtcacccagttcgccgtcaccgatggcctcgtggatctgagccggttcggtgccgacaagctcgccgacgacttcgccgccggcccgtggaacaagctccagtacaacaacaagccgtacgctctgccgattgattccggccctgaaatgttcttctacaacaaggcagtgttcgacaaggccggcgtggacggcgagtccatcaagacttgggacgactactacgaggccgccaagaagattcgcgccatcggctcctacatcaccaaccttgccggcacgtccaacgactaccagcccttcaccgcccagatctggcaggccggcgcccggccgtggaaggttgatggcgagaacatcactatcaacatgaccaaggacgagggcatgcagcgctatatccaattcgtccagaagctcatcgacgaagacctcgtggacaccaagaccccgaactggtccgacgattggaaccgcgagctcaacgatggcaccctcgcctccctgaccatcggcgcttggatgccgatcaacctcatgaccggcgcccccgatcaggccggcaactggcgcgtcgcccagctgccgcagtgggaggacggcaaggaagtctccgccgaagacggtggctccgcacttgccgtcacctcgcagtccaagaaccaggccgctgcctacaagctcgttgagtacatgactcatggcgagggcgctcagaccatggccgacaccggtaccttcccgtccctgaagaagatcctgaagtccgactccttcaccgacccgaccaccgagtccaacaagaagaccaacgactacttcggcggtcagaacgtcaacgaagtcctttccgccgcggctcagcgcccgaccgagaagttccagtacctgccgtacaacccgtacgcccagaccgcttacggcgacgaagtctccaaggcctactccggcgacatcaccctggaggaagcactccagaactacgccaagaagctggccgagcaaggcaagcagcagggctacaacgtcaccgtcaagtgacacaatccgatctattgccggtacatccggcactgaccaacaatcaaaacctgcggctaggccactctccttccgcctagccgcctgatctcccacagcggggatgctccccagtgtctccgctttcccatgccctcacctgacgtgaccgctccaatcgagcgaccccccctgatagcgggcgcagcacagcaatccgtatcccaagaaagcaatcgattatgtccgatcaaacaatggccgcagcctcgcagccaacggtgggaatcctgcctgaggaggcggatctgcacacggccgaggcccgcgtcaacaagcataaggccgattggcgtggatggaagttcatgtggccgttcacggtggtgttcgtgttcgtgttcattattccgattgtgtacgccgtttacatcagcttcttcaagaagcagatgatcggcggcacgaggttcgtcggggtcgagaactacgcgcggttgctgcaggacggccagttctggtcgtccgtgggtcgtgtggcgctgttcacctgcgtgcaggtgccgatcatgctgttcctgtcggctgccatggccctcgccctggattcgatgaagctgcacggcgccaagttcttccgcatcagcacgttcctgccctatgcggtgcccgcagtggtgtccacgttggtgtggggcttcgtgtacggcgcgaagtacggcctggtgggctcgttcaacgacttcttcggcacgaacgtcgacgtgctgcagccgagcgtgctgcttgcctccatcggcaacatcagcacgtgggagttcaccggctacaacatgctgatcttctactcgtcgctgagcaccatcccgcactccctgtacgaggccgcctccatcgacggcgcctccgaatggcagatcgtcaagtccatcaagctgcccgagctgaagggctcgctggccatcacggtgatcttctcgatcatcggcagcttccagctgttcaacgagccgagcatcttgcagaacatggttccgggcaacgcgatcaccacgtactacacgccgaacatgtacgcgtacaacctgagcttctccggcaaccagtcgaattacgcggccgctctggccatcgtgatggccgtcatcaccatggccatcgcctacgccgtgcagctgaagagcatgaaggagcagatgaagtgacgatgaccgcccgtattgccggattggtttcgattgtgaaggagcgtgcgtgatgagtgccgcagcatctacccgtctgactgacgccgaactgaaggcgcaggagaaggccgccaggaaggccgagaaggaacgccagaagcgcatcgccgccgatgaggcggccgagcgcaagcgcagcgccagggccggtttcgcgaacgtgaacaacccgcgccgttcgaccctgatgaccgtgctgtgcgcgatcttcgccgtgtactgcctgttcccgttcgtgtacctggtgatcaacgccaccaagacccaggccgacttcacctccacgttcggcctcggcttcggcaagagcttcgccctgtgggacaacatcgtcacggtgttcacctaccagggcggcatcttcggccgctggctgatcaacaccctgctctacgtggtcgtcggcgccggcggcgccaccctcctggccatcatgggcggctacgcgctggccaagttccgcttccccggccgcaaggccgtgttcgccgtgatcatcggctcgatctccgtgccgggcatcgccctggccgtgccgcagttcctcctgttcgccaagctaggcctgaccaacaccccgtgggccatgatcatcccgtcgctgatctccccgttcggcctgtacctgatgtggatcttcagcgagcaggccgtgcccaccgagctcctggaggccgcccgcgtggacggcgcgtccgagttccgcacgttctggaccatcagcctgccccttctggcccccggtatcgtgacgaccgccctgttcacgatcgtggcgacgtggaacaactacttcctgccgttgatcatgttgaaggacgccgactggtacccgctgaccatcggtctgaaccagtggaaggaccaggcttcgaccgcaggcggccaggccatccagaacctggtgatcaccggctccctgatcacgatcatcccgctggtcatcgcgttcctgtgcctgcagaagtactggcagtccggcctcgccgcaggcgccgtcaaggagtagttgctactccctctgactctcctcagagaggggagctggagaaatggggtcttggcttccctctctgaggagagctgtcgaacgcagtgagactgaggggagccaaagcccaaaaccggcaaacacagcaccggccatgagccgatacaataaaggatttgattaatatgactactcgtagagcatttaggtggccgtccctgctgacggaatccggccgcggcatcgcgttcggcggcgactacaacccggaccagtggcccgaggagacgttggacgaggatatccgtctcatgggtgaggccggcgtgaacgtcgtatcgctggcaatcttcagctgggacaagatcgagccggtcgagggcgcgttcacgttcgagtggctcgaccatgtgatcgacaggctcggcaaagccggcatcgccgtggacttggcctccgctaccgccaccgcgccgctgtggctgtacgaatcccatccagaggtgctgccggtagaccggtatggtcatatcgtcaacgcgggctcacgccagtcgtggcagcccacaagcccggtgttcaaggaatacgcgctgcgcctgtgccgcaaacttgctgaacgctacaaggacaacccgtatgtgaccgcctggcacatgggcaacgaatacggctggaacaaccgctacgactactccgacaacgccttggccgcgttccgcacgtggtgcgaggccaagtacggtaccatcgacgcgttgaacgaggcgtggggcacggccttctggtcgcagcacgtgaacagtttcgacgaggtgttgctgccgcgtcacatgggcggcgatgccatggtcaacccgccgcagcagctcgactatgagcggttcggcaacgacatgctgctcgacttctacaaggccgaacgtgacgctatcgagcagatctgccccggcaagccgttcaccacgaacttcatggtctccaccgaccagtgcgtcatggactacgccaaatgggccggcgaggtggacttcgtgtccaacgaccactacttccatgaaggcgaatcccacttggacgagctcgcctgctcggacgcgctcatggactccctcgcgctgggcaagccgtggtacgtgatggagcactccacctcagccgtgcagtggaagccgctcaacgcgcgcaaacgggccggcgaacttatgcgcgactccctggcccacgtggccatgggcgccgacgccatctgcttcttccaatggcggcagtccgtgtccggcgccgaggcgttccactccgccatgctgccccacgcgggcgccgacacgaaggtcttccgcggcgtatgcgagctcggcaaggcgctgaagactctctccgacgccgggctgcagggcactgagctcgagcgtgccggcacagcgatcctgttcagcgcggaatccgaatgggccacacgctccgaaaccctgcccagcatgaaactcaaccattggcacgacgttcgcgactggtaccgcggcttcctggatgccgggctgcgcgcggacgtggtgccgctcgcctacgactggactgactacaaaaccatcgtgctgcccaccgtgctcagcctgtccgacgaagacgttcgccgtatcgccgacttcgcgaaggccggcggaaccgtcatcgtcggctacgccactggcctggtcgacgagtacttccacatcgggctcggcggatacccaggtgccggcaatggcctcctacgcgacatgctcggcatccgcagcgaagaattcaacatcctcggtgaagaagccgaaggcgagcccagcgaaattagcctgtccaacggtctgacgacccgcctgtggcagaacgacgtgacttccgtagccgcggacaccacagtgctcgcctcttacacaggtgagtccgccgccgactgggagctggagcgcacccccgccatcaccagccacccctatggcaacggtaccgccatctacgtgggctgcgacctcaaccgtcatgacattgcccagctgctcaaagcacttggctcccgctggcgggagctgtcggcgcagccgactgagggtggtcaaactccaacctatcccaccacagatccccgcatcctgcacaccatccgccgatccgcagacggctccacccgcttcgatttctacctcaaccgctcaaaccagcccgtcgccatcaacggtgtggaaggcaagcccatcatcgcccaccgttgcgagacggatgccgtcggatatacgctgaaccgtaacgctattcttatcgctaaaacgtcctgctagaccgcgttagaatggcaatgttgtccggatggaggagcgcggcatgagcgacgagaaaacagccaagcgtcgagtgacgctacgcgatgtcgctcaggccgccggtgtatcgctcaaaactgcgtcgaacgtgatcaatggctccggacgtatgaccgatgagacccgtgccaaggtcgagtcggtcattaaggacctcgactaccgagtcaatgtggccgcccgcaacctcaaccgcaatcacaccggtttcatcacccttgccgtgccttcgctgattccgccatatctggccgagttggccaaccgcaccatcgaggccgcccgccagcgcaactattccgtatacgtcaccacgtatgcggaaggctccgcgaaaggcgcgcgcgatctgctgaagaagttcaactccacggtgtccgatggcatgatcctttccatgagcgaggtggaaaacatttcgcccgatgatctgaaggttgattttccgctggtcatcgttggcgcgcgtaccacgtggggcattgtggatcacgtgaccccagacgatgtatccgcagccgccatggccgcaggctacctgtatgagcgcggttccaccagacttgcagtgatcggtgcccgtgacgtttacgacgaagatgcattgctgaatgccgtagaaggcaacgcgcagctgcgtctgcgcggcatcatcgaagagacccgcaggcgtgggctctccttggatccgcagctgattggcaacaccgatcaggattggaccatcggagccggtgcccgtgtggcccagcggctcattgattccggcgtgccgttcgacggtgtgatcgccctgaacgatcagttggccatcggcgcattgaccgctctgcgcaccgctggttatgaggtgcccgcgcaggtgcaggtcatcggcttcgataacaacgaggaagccccctacttgcagattccgctgaccaccatggattcccgccttgactggacggctcccacggcagtgaatcgcatcctcggacgcatcgacggcagcatcatcaagcccgaactgctcaccaccgaatcccaagtcatcgcccgcgcctccacgcgttgaacgacattgctgtaatgctggtgttgctgtactgggccgtacgaggcgatgatacaccggttgaccaacgcggtataaagtgttaaggtgacaattgcgtgatacacagctgtaccacgtggcgcataaggaaaggaagcgccaagcatcactgggcgttcgttctgagcgttcaccattcaaaggagaaaaagcatgcgccgaaataccgcgcttactcgcattatggcatccagcgtggccgccataatgctctgcgcaggaggcatgttcactgcaaacgccgccgaagaagaaccagtcaaagccgccgtctcggtcaaggccatccaaggcttaagcgatgatttcatcggtggtatggacgtctcatccatgctctcgctggaagaaagcggcgtcacgttcaagaacgccaatgacgaggtcgaggatttgttcacgctgctcaaggaatccggcgtgaactatgtgcgtctgcgcgtgtggaacgatccgttcaccgcagacggccaaggatatggcggcggcaacgtcaacgccgatcgcgcactgaccatggccaagcgagccacggcagcagggctgaaagtgctggtcgacttccattactccgatttctgggccgaccccagcaagcagcaggtgcccaaggcgtggaaatcctttgaaggcgacgtggacaaaaccgccgacaccatatacgactacaccaagcagacgctgaccacgttcaaacaagccggcgtagacgtcggcatggtgcaggtcggcaacgaaaccactgcgaaaatcgccggcatctccggctgggacggcatgtccaaagtattctccgcaggctccaaagccatacgcgaagtgctccccgaagccaaggtcgtcattcatttcaccaacccggagaaagccggcacctacgccacttatgccaaacagttgagcaaccacaatgtggattacgatgtgttcgccagctcctactacccgttctggcatggcaccaccgaaaacctcaccagcgtgctcaagaacgtggcctccacttataagaaagatgtgatggtggcggaaacgtcgtgggcatacaccttggatgatggtgacgacgattccaacacagtgcccagtaaagtaaccgccaataacctcaagaaatacgacatcagcccgcaaggccaggccgatgagattcgcgcggtcgccgaggccgtgaacaatattggcgacaatgatggcgatggcaaaaacgacggcctgggtgtgttctactgggagcccgcatgggtgcccgtgggcaccggcggcaaggataacgccgagctggtggatacgtggaacaagtacggtggcggctgggccactgaagcggccggcgaatacgatcccaatgacgccggcctgtactggggcggctcaggtgtcgataaccaagctttgttcgatttcgatggtaaggcgctcgcctctctgccgacgttcaagtacatccacaccggtgccgtcaccgatcatgtgttcaccaagatagatccagtggagattaccgcgactgactcggattccatcgacgcgatcaaagcgcaattgccgagtgaagtggctgcacactatcaggatggggtggacgagaccgaaaccgtgacctggcaatccgctgcgcttgactggattcgtggcgcaggcacatacaccatcaccggcaccaccaacgctggccacgacgtgaccgccaccatcaccgtcaccgccactcccgccaaggattacgtaacggacggcaacttcgagaacgctgaaaacgataagaactggaccattaccggcaccggtgcgtccatcaccgaagacagtggcaacgccgccgacggcaagcgcgcgctgaagttttgggcatccgatgcctacagtttctccgccacgcagaccattaccggactcgagcctggcgaatacgtactgaccgccatgagccaaggcgcggcagcggacaacgccgctattgccgatggtgtgaccctctccgccacagcgggtggcaagaccacgtccgatgcgctggaactcaacggttgggttaagttcgataccgccaccgtgcctgtcactgtgggtgctgatggcacagcgaccatcaccatcacgggcaacctgcctgccgacgcatggggcaatgtggacaaggtctcactcgtcaaaaagaccgaaactccggtgaagccatccacggagaacctggacaaggccgtggccgaagccgggaaaatcaatcgcgatgagtgcaccaacgagtcgctcgccaaactcgatcaggcgcttgccgccgctgacgtgctgcttgccggcagcgcctacaccgagcaagacgtgaacgatgtgactaagcttgtttccgatgccattgccggcctcgccccaaaggaggtctccagcctgaccgtcacgccaagcaaaaccacctatcaggtgggcgatgtcatcgatgccgaccatgatctcaaggtcgtgggcaactattccgcaggcatgggcaacgtgacgctttccgccgaccagttcacgctcgattacgatttctccgctcccgctgatgcggcgaaggttaccgtaacgctcaagtcgaatccgaatgtcaccgaaacctatacggttgctgttacctctcgggccgaaggtggttccggcaacggctcggacggtgcgggtaatggcggggctactatcaatcccgatacgggcgagggcgataagaccaacggtgcgaatggcggcaagatcactggtgtgctgagcaataccggtagcgcggtgactgccgtgggtcttgcggttgtcgttctcggcgtggccggcggggtctcgcttgctttgcgtcgtaagcgctcctgatagagactgatgcggcattatgatgcggttgctggcagccggcaaccggctgtcagatgccatctgtcggttttcgtctgcttggatgccatctgtcggctgtcgtttatcggttgtcggctgtcagatgcgtctgtctcggcgcagcgatgcgattctgtcccggttcgtgcatcaatcgtttgatgtgggtactaggacagaaatcactgtcccggtttgcgaaaacgggtgtttttcgcgtaccgggacaattcccgttgccccggtttgcacgtcaatcgttctacgtgagaaccgggacagtatgttgatttcgggattggctgtattccgcagattctgtttgtcaggtatgtggactttgaggattggcttgtcctggtcctcgaaaatggtccgaaattgcgtactgggacaacgatttctgctccggcgcaaacgtcaatcgatcgacgcctgtaccggggcaaattcgcgcccgagaacaatagggcgagggccggtcgcaggagtagagcgtgatgttgtcatgattgcgcccggctctcccacacggaaggccgggcgcaatcatgccgtttggttgcagccccccgcacatcgcctgcataaccgtgtacagtggcgtgtagttgcagtacatgaagggcacataggagcatcgcacatcatgaccaacggacgcatcaaccccgccaacgtgccggacatcgccttgaaagacggccagtccattccgcaggtcggtctcggcgtgctacgtatcgacgacgagggcgtggtccctgtcgtcgaatccgcgttggaagccggttaccgtcatatcgatggtgctgctgggtacaacaacgaggccggcgtgggccgcgcgctcgccgcctctggctacaacatcggcgctaagcgcgagacactgtgggtcaccaccaagctgcgtgactccgagcagggctacgactccgcactcaaggcattcgacaactccctgaaactcctccagctcgactacgtggacatgtacatgattcactggcccacgccgttcgactggcgtagcaccgacacctggaaggccttcgtcaagctgcgcgacgagggcctggcccgcacgctcggcgtgtgcaacttcatgcccgccgacctgaagcgtctgcacgaggagaccggcgcatggccggccgtcaatcagattgagctgcaccccacgtggcagcagcgcgaagtggtagccttttgcaaggagcatggcatcgccgtggaggcttactcgccgatggcccgtggtgctgacctcaacgccggcaacggcactatcgagaagatcgccgccgcgcatggggtcagcccagcccgggtgattctgcgctggcacatcgaaaacggcaccatcatcattccgaagtccgtgcacgcagcacgccagaaggaaaacctcgacctgttcggcttcgagctcaccgccgaagaacatgcagccatcgatgctcttgacggtccgacccgcgccggtcatgaccccctcaccttcacctacgcctgatgtctccgcaccgtcgtccttaccgttccagcgctcacttcagccgccgcttcaacgcctccggaccactggagcgtgtgcttattctcattgtcattgcggcggtcattggcattacggtcggcctgctgctgccgcgagtcaatcctgatgcagccaagctcaccggcggatacaccgccaccggttccgccgctgacacgttgaacaagcttaccgtggatgacaaccagagcgcacatggctacgaccgcgattcctttgcattccgttccgtcgatactgacggtaacggttgcgacgcccgcgatgatgtacttgcccgcgacctgaccgacgtcaaatacaaatacgctggttcctgtgtggtggtgtccggcacattggatgacccttataccgggcaaaccatcaacttcgtgcgcggccgcaccaccagcgccaaagtgcagatcgaccatgtggtagcgctcgaaaatgcatggcagtccggtgccaacaagtggcccgcagccaaacgccacgagtttggcaatgacccttataatctgctcgccgtggatggccccgccaaccaggagaaaggctcagcctccgccgcttactggctgcccaccaacagcgaataccgctgcgactacgtggcacgccaaattggcgtcaaagacaagtaccaactcaccgtcacatcccaagaaaaggatgccatgctcgccgtcctccacacctgccccggccaagccgtgccagcggattaggaggaagaggctatctcgaaggattatccagtagaggagcgtgcccctcgtcaaatgctcgtagcagtcgtcgcaagagaaatgtggcgaagtaaggtgcagtaaacacatgttcactactgccgatattgcctgcagataatttcacgctaaactgaaactccggatacgagtcagaagagatcaacgttcgcatagatttggcagtagtaaacatgtgtttactgcaattactgcgattctgcactttcatgagcgagtttctggtgacgtagcatatttcatgagtgagataaacggcgtatcctctgttgactgactcatcattcgccaattgtccgcaaatcgtttgtgtattgacacccgaaacatgcctgcgctataactgggcgcggtatgaaggaaataggggaagacgatatgacagcaccacacacggcagcaagcgccactgcggcagacattgagcaggaaacgtcggaaatcgagaaggaacgccgaattgccagcggtgaggcgaacaacaaggaaaatcctcatggacatgcgctcgctagcattttggggcccgcgttcgtggccgctgtggcttatgtggatccaggcaacgtggccgccaacatcacgtccggcgcacgctacggctacctgctggtatgggtgctggtgctcgccaacgctatgagcgtgctcatccaataccagtccgccaagctcggcattgtgactaacaagtccctgcctgaactgttgggcgaacgtatgagcgacgccggccggttcatgttcttcatgcaggccgaggtcatcgccatcgccaccgatttggcggaggtgattggcggcgccatcgcgctgaatctgcttttcggtctgccgatgttcctcggcggcctggtcatcggtgcggtctccactgtgatgttgtggttccaaggcggcaaatcgcaaaccacattcgagcgcatcatcatcgtgatgctgctggttatcacgttcggctttatcgcgggtctgttcgtggccccgccgaatcccgtcgaagtggccaaggggctgattccgcgctttaagggtactgattcggtgttgatggccgcttcgattctgggtgctacggtgatgccgcatgccatctacctgcactccacgctggtgaacgaccattacgcgggcggcgagaagccatcggtcgagcgtcagctcaaaggctcgaagattgatgtggcttgggcgttgttgctggccggcacggtgaatctggccatgctggtgcttgccgccaactccctgcatggcatgtcaggcacggattccatcgatggcgctcagcgggcgatcgcgcaggtgctcggcccggtgattggcatgattttctccatcggcctgctggcttcgtcgttaagctccacgtcggtcggcacctatgccggctcggagatcatgcacggcctgttgcacgtcaacgccccgatgtgggcctgccgtgtggtcacgctggtgccggctctgattgtgttgtggttcgccaaggaccctacggaggcactggtgattggtcaggtggtgctttccatcggcattccgtttgccgtgatcccgctcatgcgctatacgcacagcaaggaactcatgggcaaatgggctgacggcacagttaagcacatcatcttcctgattgtggtggcgctgattgtggccctcaatgtgctgctcatcgtcctgacattgatgggacgggcgtaagaagctgatgagctcgctcccgccagcgggagcgagcagcttaccgagccatacgccgtgcgcggcgttcgcgcagcgcacgcaaggaaataatgtcaagcgtacgcccagcgccgtcacccttgacgccgaagagcaccatcagcaccatcacaaagcacagcagtgcagagaagcgaagcacccactggatgccaaagatggaagccgcaacggctgagactcccgcctgatgcctccatgcggcaaacgtctccataagaatcaccaacacaggtgcacccacggcgcctgcgatctgccgcgcggtgttcgtgaccgacgatccggcagacacctcatccggcccgttcaggcagttcagcgaccatgtggtaatcggcataagcaggaatcccatgccgatctgacgcgtgaactggcaaatcgacacccaccaaatccatgtatccatagacaccaaagacatgccgagcgtaccgacggtcagcacaatcgagccgcacagcgccacgggtcgcgcgccaaaacggtccatcgcccgcccgccgaagaactgggaaacgcactggccgagggcacccggcagcataatcaggccgctcatggtggccgaatagccacggtcggtctggatatacagcggcatgatgaccagaatcgagctgaacgcaaagaacgccagagatgccgtgatggtgccgacggtaaaggaccgattcttcagcacttcaagatccagcagcggaggctgggggagtgcggtcggctccgctcccgactgcgccgccttggcttcgcgataccgccgaccgtgacgcaggttgcgcatcacaaaccacacgatgccgaccagtcccacaaccatcggtccccacgtgaccggtgccgtaaatccataggtctccgaattggtgaagccgaacatcagcccgccaaaaccgattacggacaggcttaccgagaagaaatccgcgcgggccgacgggtcatgcgagccgaaattatgtagtccgaacatggccgccacgagcgagattacgccgatcacggtcatagtcagaaagatggaacgccagccgttcgcatcggtttgccagccgcccagcgtggggccgatggccggcgccacactcatggccatgcccaccgtgcccatcgcgaatccgcggcgagacaggggataaatggaaaacacggtgatttgcagcaccggccacatcacgcccgtgcccgcggcctcaagcacgcgcccgagcagcacccagatgaagctcggcccgacccaggccatcagcgatccgaccgtgaacaccgccattgagcaaatcacgatctggcgggtggagaagcgccgggtcagaaacgcggtcaacggcaccatcacgcccatgaccagctggaacacggaggtgagccactgcccggtggtcacggagatgtggaattcggaaacgatgatcggcagcgccgagctcagttgcagctgcgtgaaattaccgacaaaggtaataaaggtcaggattgcgatggaaataaatgccgcgcggctcagtttaccgtccacgtatgattcctcacggctcagtacccgctgcaattcgccgcgacgattcttgattccctgagctccagtcacgcactaccccacttctgttgcccggcctgttgccttggcggtgtcggtggcgcatctgttcagtgatatatgcgcctcgcatatcaatgcgtattcgatgtattcggcgaccgtcgtcttcgcgtgcttggccgagcagcctctcaaagcaccccaatacgctatacccaggggtggtccagtcggttcggaatatgtgcagaagcggggggcgaacacgctttgtgcacaagaccggggcataataggcggttggttattgcaagaggttacaagtcaataagatcagtttgggagttagtatgagcgttcatagggcaagtcacgcaacaagtattccacgcagaaggcaccgcatctggccgtgggtggtgttgattctggcgctacttgtggtgctgctaggcgtgagcggattcttcggtttgaagctgtattccgaagccaagcaggtaaaggtgcatgaggaacaggcgatgcagctgctggacggtgtgaccgacctcggtaacctcgacaacctcgatacggtgaggcagcagatcagccaggcaaagaccgagaccgcggctgcgaacgagattgcgcacggcacgctgtggaacatcgcttcgaaggcgccggtgtacggcgacgacatcaccactgtgcagggtatgacttcggtggtggattcgctggtcagtgattcggtgccgcagtttatgaacgtgctttccacgctgaagagcgcacagctcagctcaggcgacggtcagctgaatctgcagccgattctggaagcccagaagaatattgccaccgcgaaccagtcactgcagcagcaggtgcaggagtatcagcaactgccgaaggcccatatcggcatggtgaagaacgcctatgccaccggcaatacgcagctgaccaagatggcggacaaggtcaatcagctgtccggcacgttccagattctaccggacttccttggctccgatcagccgcgcacgtatgcgttgatggctatgaccacttcggaggagcgttcgtccggtggcctgattggttctgtgggtgtggtaactaccgacaacggcaagatcagtatcggtgatttccgttcggatggtgaatatattccatatggtgctggtgatcctacggaagacgagcagcgcatcttccggcagtggggaccattgaacatgtcattcgatgtgcgagatttggccgtataccctgatacttcacgcagtgctgaaggtatgcgcgcgatttggcagcgcacgccgtgggggagcaatactcagctggacggcgtgctcatggttgatcctgtatttttgcaggaacttacgaaaatcagtggtaatgtcactattcctgatggaacggtgcttacgggagataacactgccgagtttttgttgaacaaggtgtatgtcgattacccagtctccatgcaggacgccctatttgctcaagtcgcagaacaagcagtcggtagtatgttcagcaatattgatttggctaaactcaccaaggtcgcacagcttatgggtagcatggccgaaggccgtcacttctccatgtacgcattcgacgaaactgctgaaaaaaccattagtgatgcaggctttactgcacagactccgagcagtgaagagcatccgcaggtgggagtgtatgtgactgagcagaatccgtcaaagatgggatggtatattcatcgcacctcgaaggtgactcgttccacctgtgataatgatggttcccagacctatcatgtggaatacacgatgacgaatacactggagagcagtcagattggtgctctaacgagctatattcttggatccggcggacaaggagtagaaaaaactttgatttatgcgcctgccgggggctccatctcaaatcttaagaccagtggtggttcagtgacggagagccgtcaagaaacattgaatggtaaaaccgtgtatgcgagcaatgccacgatagctcctggagagtccgtcacctattccttcgacgtgaccacgtccaccaaggctgtctccgacctcaccatcgaccaaactccaatgggctggattgattccggcgtcaccaccgacaccgctgcctgctccatcaacaagcagtaaaaagagctccctctgacaagggagctgtcagccacaaacggctgcctgaggagagagaccaaaaacaagagggcgtcagcaaaaagctgacgccctctacattgcgaaaactacataccagtcccattaaataccgcgcccactgtcttcagcagaatcgcaatatcccccgtgatagaccaattctgaatatatgacacatctgcatattcagactgttcctgagacaaatcattacgcccggaaatctgccaagggccggtgatacccggcttgaccagtaggcgagtggaatacaatggcgagtactggtcaacctcatattgacgttgcggacgcggacccaccatagacatatcgcccttcagcacattgaagaactgaggaacctcgtcaatggaagtcttgcggatgaacttaccaattttagtaacacgaggatcgtccttgaccttgaatgttgttcccagttccacgccagctgcggcagccacttcggcatccatcttatcggcgttcagccgcatggaacggaatttgtacatagtgaaaggcttgccgtagatgccgatacgagtctgtgagtagaacacggggccaccgtcttctcgcttaaccttatatgcagcccatagcatgatgggcgaactcagaatgattgccaccagggagagaacgatatcgcacacacgcttaaagatgcgagtcggcagagaatactgtgcaagtcgggctgtcaaaatcggcatagaggggtcattgtgtagctgcaggtttgcgccgctcagatctgcaacggatgcagtaagagccagctcgatgcccatagattcaacagcgagcgaaagagtacgcatggtttcagaatcgcgcgtcagcacatcagcgatcagaatagtgcgaaccttcatccgcttggcggtctgaggcaaatgggagttcaacgccaacaccttgagccgcgcttcttcatcattggcaggaataaacggaaccgatacaagatgttgagcagcattcgggtcatccgaatcacacacagaggcaacagggcagaccgcgatgggtgcataccccaggctgaggcatgccttgagctgcttcagtgttttactgatgccctccggagagccaatgataatagtggggtagttgaactcaccttttgctcgattgcggtgaagcgcacgacgcatcagccaccgttcaacgataacgaggatgagagaaaggataggaataaatacattcagggaacgcggcacattcagatggaacaagtagcccaatgtacagagcataatgaagtcgataaaggccgcattcagcagcttggcatatagtccgtatccctcgcccatagtgtggcgttcgtagcttcgagctgcatagaggctgatgagccaggagatgcaggccaagctcaggaaactgaatacaccataatcggatggtcccatgttctgcacattggcatatgctcctggattgcacgcgaatacgatgcaggtggcgatgatggtcatcagcagatccagaatcaccatggtcgtattgtacagataacgccatttgggcactgaatattcggtgagatgaggcctatcgccagcatcgttatgagtaacggtgccatccggagaagacgagaagtaagtgccgtcaaaaaatgttggtgcagccgtatcaggagttgcgtccgcaatgtgagaatccgtatgtgctgcctgagcacggctgatttgcactcggtgcagtgtctcagtctctgctgtggtgttgttcatatgttgagccgttgctgatgccgtggtgctgattcttgacatggtacgtgaacttcgtccccttaaggtatttcctgaaactgcaaggaaatcatgttaatttcatctctgttgcacaccctaccatgagtccgccccccccccctatagcaaaatcgctcaaaaaaacgaatttcccattagcgttctgtgaagataaagtgatggtgggcggacgcggattggtcacagtccgacgtatcggactaaaatggtgcgctagtagtttgtacgcatgtacgcaggcccgcaaggtggcgttgtaagtatgaagaaggactgagcccatgcacgttatgttcgtctgcaccggcaatatttgtcgttctcccatgggcgagctgctactcacccgttatctttccggtaccacggtgcaggtttccagcgcgggtacgcatggtttgcccatgcatcagattgatcccaacagcgccctgcttatggaaagcgtaggaatcgaaccgagtgggttccgttctcggcgcctgacgcagccgatggcaaagtccgctgatctgatcctgtgctttgaaaaggatcagcgtaaagacattgtcacgttggctcccactgctgtgaaatacacgttcctgctgggcgactttgcgaacatgtgtgagtactgcgcgcgcaatggactggtcaagggcttgaccattcaggaacgcttgcagtcagtgatcaactccgcgtccattattcggcccatgcttcccgaacccgaggatattgaggatccgcacggtaaggaatatgcaaagttccgcactgccgccgagcagacgaacaaagcgctgcgcaccatcctgaccagcatgcgtaagcactaccgcgttgaggaagccccggtacggcctcaaattacgcgtcagtatgcttatacggtatgagtgtttttgtgatacgggtatctatacttcatacttccagatgcggaagatagtctcgttcaaatatacccgttatctatttgtaagtgcaacatccttgttctcggctgattctagcagttcgcgtgccatggagggggcgatgggcgtgcgtttgggcgggtagcggcggatcatgccgttcctgttctcgttgccgccgcgccgccacgagctgtacgggtcggcgaaatacgtggccatgcccggttcgtcgcgcagcccggcgtaccgggcgaactcggtgccgtcgtcatgcgtcactccggtgcgggcggcggccggcaaccgggagaacatggcctcctgcgccaccacgctcgcggcggcggtcttgtcgggtacgatcgcggccatggggaaacgggtgcgccgcccgacctcggtgtgcaggctgcagcccgcgccgatgacgccgtcggcctcccactcgccgaaacggctcctgtcatcctgcccgcatgggcgttcgcagatcgacgtgcgcaacgggacgcgaccgcggcccgcacgcccgccgccggccttgcgcctgcgccggcggccgcgcggcagcgcatcacggggccaccgggatgccccatggcgaggcgcccgcacatcagcggcggcgaccggccccggcgcaaccgctccgcgacccacgcctgcaggcggcccgacgccaggcgccgcggtctacgcgcaaccgcctcgcggcgcatgggcctgcggcgcaagggcccggccacgtggcagcggcccgtccacggacccgtcctgagccgcctgggccggcacggccggcacgattcgctctcgctggacgggaaccacgtgtcgcgtctgatctcccggccgactgcggacgcatgccgtccccgcatcatggccctgcggcgcacgctcgccccgttgcccatctcaatccggacgacctgccgttcctcttccgacaggtgcgaatacacctggcccaaggcgcaacacccctccgtttggctatccggacaatctccaatctaacgggtgctgcactttcaattagacaacgggcttctcaccatgccgttataatgctgttataatgctaacgtttacacaaaaagatcggggagtggtacgagccccgttcgttcggagccatgcatgagcgagaagaacaagaagatttgtattgccgtggcggcgcataagccataccgtatgcctgcggattcaatgtatatgccgatgcatgtgggaaaggcattgcatccagatatcgatttgggggcacaattcactccggacaacacgggggacaacatctctgctctgaatgccttgtattctgagcttacgggactgtattggatgtggaagaattgtaacgccgaatacaagggactggttcattaccggcgtcacttcgctacgcgcaatgttgccaagcggttattctctcgtgataggttcaatcgtatagctaccgttgctgacgtattgccagtattggaaggtgcaaacggccagcctggtgtggatgtaattgttccgagaaaacgcaactacttcattgaaaccatctattctcattatgcccatacgttgcccgtggagcagctggacgaaactcgcaagatcatagcttccaatcagcctgactatttaccggcttttgaccaagtaatgcgatcgaagaccgcccacatgttcaacatgttcatcatgcgagcaggatgcttcgatgaatactgtgcatggctgttcccgatacttgaagaactggtgcggcgtattgattccgcccagtacgacgctttcaacgctcgatatcctggacgcattagtgaaatgttgctagatgtgtggctgcaaacaaataaagtgtcatacgcggaattaacaaccatgagtccagaaccggtggattggtggtccaaaggaattgggtttttgagagcgaaatttggtggcaagaaatacacgaaaagcttctaaaaaattccataataattttattggtcgctgtataggaggtaagtgattatgcctaaagcggagtatcccgatctggtggtcgtgggcgcgggcctgttcggcctgaccgtggcccagctggccgtggagaggctcggggttcgcgtggagatcatcgacgtgcgcgaccacattggcggcaacgcgtacagctacatggacgaggagaccggcgcggagatccacaagtacggcgcgcacctgttccacacgtccaacaggcgcgtgtggaactacgtgaacaggttcacctcgttcaccgattacgtgcaccgcgtgtacgccacgcacgacggcgaggtctaccccctgccgatcaacctgggcaccatcaaccagttcttccgcgcgcactacacgcccgccgaggccagggcgctcgtggcccggcaggccggcgagctggccggcaaggatcctcagaacctcaacgacaagggcatctcgctgatcggacgccccctgtacgaggcgttcatcaagaactacacgggcaagcagtggcagaccgatccgaaggacctgcccgcgggcatcatcaaccgcctgccggtgcgcttcaactacgacaaccgctacttcagggacacgtgggagggcctgccgaccgacggctacaccgcgtggatggagcgcatgatcgacgatccgcgcatccacgtgactttgaaggccgacttcttcgacgggtcgcagccgttcaacaggaaggccctggccgccgcgggcgtgccggtggtgtacacgggaccggtggaccgctacttcgattactcgctgggcgagctcaagtggcgcacggtcgacttcagggaggtgcgctacgacgagggcgaccatttcggatgcccggtgatgaacttctccgacgcggacgtgccgtacacgcgcgcgatcgagttcaagaacttcaacccggaacgcagggactcgcagaacccgggcaaaacggtggtgtgggaggagtacagccgtttcgcggagcgtggcgacgaaccgtactatccgatcaacacggaggccgacaaggcgctgtacgcgaggtacgaggagctcgcgaaggccgagccgctcacggtgttcggcggccgtctgggcacgtacaagtactacgacatgcaccaggtgatcgacaccgcgctgaccgcgttcgaggagcgggtcgcgccgatgctcaagaagtgagattctacgtatagtggttccggtacgtggcttcttcttcagcggcctgttcgtcgactcaaccatggcgttgtcgtacgggttgcctttgcataacagtgaccgcttgatgccgaacacatgaagcagttcgtcgattcttgtgttccagaactcgccgttccggtccgagtgaaacacctgaaacgtcggtcaggaggagtcgggcgtggcgagtgccaatggtgccaggccccgtcccgggcccatccggcggaatggttggtgatgcccctgtccgccaggccgaccagcaggcacacatacgaccattcacccccccccaaccctcacgtacatcaggtcactcgccaaatgcgtgtgcggggtgtagttgtcgaactcgcggttcaacagattcgcgagttcgaccttgttgacccgcatcctgtgcggtttgaaccgcttgcgcgcgtaagtgctcgtcatgccctgttcgagcatgacgccgtcaatgcgtctgtgtctgttcaatagaaagtgggccgtgtgagcgtgtggaaagtctccagatgagcggcaggttttagtccatttcagcgtgtggcgagaaatgaacaccggcccgtcctgcccgtactagtttcccgagtcggaagcaaaccattcggtttctcgggaaaggaaaggaatgacggtaccggtgtccgtacaacaacgtatcagggtgcttgacgcgcatggcgtgtcatggagaagcatcgcaaaagaggtgggcgtggcccgcgacacggtcgcgaaatacgccgggagggaggattgctctcccaagccggagcactccgcatcgaggccgtcgaagctcgacccgttcaaggcgacggtcgacgggtggttggaggcggaccggttcatgccgcgcaagcagcggcacaccgccaagcgcgtgtacgaccggctcgtttcggagaggggctacgggggcgcgtactcgtcggtgcaacggtatgtgaagcgttggcgcgaggagcatcggctcccgtcggacgggtatctggagctcgagtggcatccgggcgaggcgcaggtcgatttcggcatggcgcgggccgtggtcggcggggaccgggtcgacgtgcattgcctggtcgtgacgttcccgtattcgaacatgcgctactgcgtggccctgcccggggagaacgcggaatgcgtgtgcgcgggactgcgcacggtgttcgagcacataggcgcggtccccctgacgctggtgctcgacaacgccaccggcgccggtcaccgggtcgcgtgggacagggtcagcatcgtcaaggtgttcgaactgttcgtggagcattaccggctggagaccaggttctgcaatccgaactcgggcaatgagaagggcagcgtggagaacgcggtcgggttcctgcgccgcaacatcatggtgcccctgctcaacgcggagtcctacgcccagttgacccggtacatgctggagcggtgcgacgcgatggccaaggagacgcattaccgcaagggcgcgccgatcggcggactgttcgccgaggagaaggcggagatgcagcccctgccgtccaagccctacgacgcgatccgctgggaggtcaggaaggccgacaaggacgggcgcgtgcaggtcgacggcaaccattacctcgccggaccctcgtggcgcggctggacgttggacgtcgcccttcgcgcgttcgacgtgacgatccgcacccaggacgggcgcacctgcgccaggctgccgcgcgtgtacggggattcgcctgccactatccgcgaccccgccacgctcctgcccgcactgggccgcaagaccaacgcatggcccgattccaccatccgcgatgattttcccgacaaactgcgtctggcgatcgaccggatggacgccaaggcgcgcaggaacgcgttccggctcatctccagaacgagcgacgcgtgcgggttcgagccggccgtcgaggctggtgagcatctggtcgaacaggggcacccgctcgacgaggcgagcctgaccaccatggcacggcgcatcgcctccggcgagaagccatacgagcagaccgcacccgacctgaccggatacgacgtgttcatgcagcctcgtgggacgcgggaaaggaaggaggcgtaaacatggggatccaccgcccaccggtcgtcatgcccgacatgaaacgccgccgcgcgtccaccggcgagaagatcgaaacgatcatgaacctcgcgcgccggttgcccctgacccgccagatcctcgccgaccagctcgccaacgccacgccaacccagatggagttcgtggaggaatggatgaatgccgaactcgaatcccgggaacgctccaaacgctcccggctcctgaaacaggccggattccccgccgacaaggaactcgacggctacgactggaccccgatccgcttccccgtcgactacggaagacagcggatcgaatccctggaattcatcagcggccacgaggacctcgtcctgttcgggcctcccggcaccggcaagacccacctcgccatcgcgcttggcaggaacgcatgccgcaggggcatgcccgtgcgctaccacacggccgcaagcctggtcatgcggctcctacgcgcccagacggacaatcggctcgaccgggaactcgccatgatcggcagaaccccgctcctgatcatcgacgaactcggctacgtgcccatcgacgaggaaggcagcaggctcctgttccaggtcgtcaccaacgcgtacgagacccagagcatcatctacaccaccaacatcgagttctccggatggggcaggatcttcggcgaccccaacatggccgccgcgatcatcgaccgcaccgtccaccacggcaggatgatcagattcgagggcgagtcctggcgcaagacccacgccctcatgcaataaccgacaacccacaggactggccaaagccgaaacggcctaaaaacaaccgctcaaacggactaaaagaaacgccgaaacggcccacaaaaatttgacgttgataatggttatgccggtttctgatcggtgataatggtggatgacggcttgggcggtgaccccacatttgactgacgccatcggttccggtggctgtccttattttgatttgtcccgcccatggccgccgacccgtgggccatggatgcatgacctcataggagcgtggccgctcccgtcggatcccgcaagaaccatggtagcgtgccccgtcaacgtcctgtctgcgccgcaagcccccgggaggcatccgaacacatggaaaggaacgacgacgatgacgccgccgaacgaagtggtgtgggccgggatcgacacccacacggacacgcacaccatcgcattgctcgacgagcggggcaggccgctgggcgccgagacgttcacggcggacccggacggatacgacaggctgatcggcatgctgcccgggccgggcagggtcgcggccgtgggcgtggagggcacgaactcgttcggagcggccctggcccgtcgtctcactgccgccggatacgaggtgcgcgaggtgctgcgccccaggcgaagcgtgcgccgcagggacggcaagtccgatcccctcgacgcggtcgccgctgcccgtagcgtcatggccggcgacggcacgagcctgccgaaaagctcggacggctgggtcgaggcactgcgccacctcaacgcgcagcgatcccaactggtgtcggcgatgaccgcgatctccaattcgacgaacgggctgctcgtcaccgccccggaacccatcagggaacgttaccgggggttgaggagcgagacccgcatgaacaggctcgccgaatgcagaccggccggcggcctggtcgagcggagcgtgctggccgcgctgaaatccgccgccaaggcatggaaggcgctcaaacggcaggccggtctcctggaggaacgcatgcgcctgatcctcgaggaacacgccaggccgctgctcgacatgtactgcgcgggcgccgtcatcgccgcgaccctggccatcgtcgccggggacaaccccgaacgcatccgaagcgaggccgcgttcgccaaactctgcggcgtctgccccatccccgcgtccagcggcaggaccaaccgacacaggctcaacaaaggcggcaaccggcagggcaatatggcattgcaccgcatcgccatcgtccgcctgcgataccacaagccgacccgcgactacatggccaaaaagacccgcgagggcaaaggcaagctcgagatcatccgctgcgtcaaacggttcatcgcccgcgaggcataccgggcgctcatcagcatacgcaacggcgaggtcggacgcgggaccccggccgaacgcggcgccaagctgcgcgaactacgcgtcagccggaacatcacccagcaacagatcggcgaggcgctctgcgtgccctcgagccgcatcagcgagatcgaacgcggcgcacgcgaccttcccgaactcgagcaacgggccatccagtggatacactcgacaaccaacccaaaacaacacacccaaacgcttgacaatgtataggagcatcaaaacacatgcgtcttccgtacgcagtgacggcgctcctttctagagtggttctggattggctacaatgtattagacagtccgatgagtgacgaatgacatgggattggaggccgacgatggccggcccgaaacatccccgtcactacgacgaggcgttcaaatggcagatcgtgcagtcgtaacgggagcggcaagccatcccgggagattggggccgggcacgacatcgcgcgatcgaccctgcagcgctgggtccaaggcatccgcaacagcggctccacccccaaatgcgaaagaattgattgcaataaacgttttccgttcctcgtcgtcaaggccagtctcattcctgtcttaaagagctgcgcgtccaggtgcgctacatttgatagttcgcgactgaaaccaatatgcaaaactgcgctggatagtttccatgaggcaatgccgacggccgtttgttttggcttttcgtatggaaacatttccgacactcttatccaagcggaaggctcatccttaaggcgtttgaaatagttgcttttcttttgtgtaatggattcaggattctgcacgtaattatatcctgcgtaatcggtatacctacatccgccagcggcaacgaggcgcctatgataaaagactgtatcctcaccaattgtcagatccgtctcaaatcggttttttcatcttgggagtccggtacaaacacgcccaaacaacctcatgagaatattgagagaaaaaaccgtaagtattgttgacggccacgtcttgaataattccctttgagggaaagggaccacgctaccatcagtactgactctattagcctcagcgttaactattgcaacggtttcatctgcataagaaagcattttttcgaaataatctatatcgacgtaatcgtctgagtccacgaaagaaaagaattcgccgcgagcccgatcaagtcccctgtttcgagcagctgctgggccactatttgtttgttttacaagatgtatttcagtattttggatagcaaacgattcgacgatttcacatgttctgtctgttgacccatcatcaattacaagtatctccagattcttgaaaagagtttggtcaatcagactctgaagacaacgccctatcgtcgcttcgcagttgaaagccggaatgatgacggagatgagaatggtctgtgtggttggtttcattgttttccttgcgacggaataattccaagatgttgggcacggtgcacagctataacagtcttgctacagcggccttgtagagtccgtaattccttgtacgcaaggcgcattccagatcgggccatgcgtcccgcctggaagtgcgcatggcctcgaactccgctatcgatgcgagccggtcgcacatgaccgtgaacaacgcctcgtgctcgtcgcgggtcagagccatgcatcttttccaggtgagcggaccgagctgctcgatcgtggatttatagagcttccgatcgaaagggactcctagtttccggcaccagtcgagcatctcctcgcatatccaataggaatccaatccctttttgctggaggacgcgttcgcggtgatcccgccgtgattcacgcagtagcgatagagatgcttgtcgatatatcgctctgtgtactgcgtgtcgatacagaacatctggacggtgtcctcgaaccagtagtcttccgggaacctcagattccgccacactctcttcgaatacagtctcgaccaggggcgccgcgcgttctcctgccttgaatgggatgcactttgattccgtcctgattcatcatgctgtatgaggctgtaacgaaatcgcaattcgcctctcggaacgcggaatacagttcctctatagcatcggggtccaaatgtcatccgagtcgacgaacatgagagtttcgcctcgcgcgaggccgataccagtgttccgggcgccagaaagtccacgattgtcttgatggatgaccctgatgcgagaatcagtctttgcgagctcgtccaagattatgccggtcttatccggagagccgtcatcaatcgccagaatctcgaagtttgccgaagtccgttgttcagttatggacttgatgcaatcacgtacgaactgttcgactttatagcaaggaacaatcacggaaacgtctatagtcgagttgttggagatcgagtctgaaatagaggtatcccaatcttgacgctgcgtgacattcatctggctttcaggcttgggcgacgcctaagaaagggtgcttctggcgttgtcgacgtgcacagtcttgccgtgtcggcatgccaacgagtacaggagatcgtttttgagcaggatgctcttgattttcgagaaaatctttcgttcgatcatgctaatcctcgcgttctgttgtcggttgcggtctgggacggaacggagccgtgtgaggaataaaaatcgcaaagctccatggcggcctgcttgatgtcgaagcctctttggcggaccggctcgactcggtctgccctgcgaccccggttcgcctcgtaggattccagcgcggtcttgaacctccagatatgtggcaggtacttcggcccgccgcgtctggcatagaaatctggactcacgcgcatggcgaccagcggctcgtttatgttgcgcgccctgcatccgtccgcgagcatgcggttgaacaggtcccagtcctcgaaatacagttactcgccgctgtagttgccagcctgcagggccctgcttttacggaacaccatggtcggatgtctgaacgggttgcgtttcttcgaataagcttcgatatctttgctatcgcaaggcaaagaagattcggcgattggctcatccggggccgtgacgaattccgcgacttgggagccgaccatgtcaagatgcccacccaaaagcacgccgagttgttcctccatgcgcgtcgggaacgcgtagtcatcggagtccatgcgtgcgacaatctcattgcggcattcgggcaggccagacgcgagggcgtggccgagcccgcagttctcctcgtacgagaccaccgtcagcagtcagggatggccactccggaacgtgtcgactgcggcgtacaggggaccagtcatgccgtcctctaccaagacaatctcctccggcggaacggtctggctgaccatgctgtcaagggcttccaagaggtgggacggatcctccttccggtagacgctcatcagcacgctgtacggggcatgcgatgtttttgttcaataggaagttgaggttttagtcacgaaggtttttcgggtttaggcggaaaggcatgccgaccacccgtgggccttagcctgatggtgcttctagttccattcgggaaaggtccggaaaggcaatgatcagcatgccccaaatacagtctatccgttcgcgtcgcaggaacggtgagtccatcgcctcgatagcgcgcagcgagagggtcagcgagccgaccgtgcgcaagtatctgagggtcgacgacctatcggccaggccgcccgtgaggcgacgtcgtggttcggtgatcgacgagtggctgcccatgatcgagggcatgctcgccgaggaccgggagacctggcgcaagcagcggcataccgcgacccgcatccatgagcggttgcgcgacgagtacggggccggggtgtcggtgtcgacggtgacccggaccgtggcgcggctcaggcgcgaggccgcggcggagcgggaggccggtttcctggacctgtcgtggcatccgggcgaatgccgggcggacttcggccaggtcgacgtgcgctaccggggcgtcgtgacgcgaatgcggcatttcgtgttggatttcccgtactcgaacatcgggccgagccagctgatgcccggggagaacgcggagtgcacgtgccaggccctcaggaacctattcgaatggctgggcggggtgcccgaacgcatcgtgtatgacaacgccgccggcgtcggacgcaaatggttcgacaggatccgcctgacccgcctgttccaggcgttccaggcgcactacgggttcgagtacacgttctgcaacccgtactcgggacacgagaagggcggcgtcgaggcccgggtcggggccgtgcgccgcaggctgttcgtgccggtgcccggcgtatggaacctcgacagcttcaacctgcgcctgcccggccgctgcctcgaactgggggacaaggaccactacaggaagggcgagagccagaccggcctgttcgacgaggaccgaaaggcgctgctgcccctgcccgccaagccgttcgacgtggtcacgtggacgaggatgaaggccgacaaatacggcaacatcaccgtccagggccgccaccggtacgcggccggacccgaacacgccggccatgagatgatcgtcggcctgagggccctggaggtggagatcctcgatgccgaaggcaaacgcgtgatcacgcatccgaggtcctacggggacaagccgaccgacagcggcgacccgtcgagccagctcgggctgttgtgcgaccggccggcggcctggcgcaacagccgggtgcgcgacgcgatgcccgacccgcttcgcgaatggatcgacgcgcaggacgaggccacgcggcgcgacagcctgcgtgccctgctgcacgccgacggcgagagcggctggcgggcggccgtggccggcatgctcgagatcctcgaatccaccggaggcacggaccgggccggggtatgtctggccgcggcgcgccacgcctcgggcctgggacccgtggcctacgacgaccccgtggacctgagcgaatacgacatcgcctacaccaaggaggacgagtgaaccagaagaacggacggaccgaccccggcccgctgcgcgagcgggcgaggagcctgttcatctcgcaggccaccatcgacgaaacgctcgaatgggccacgccccgccaactggacgccatcgaccgcatgctcgccacggaactggccaacagggaggcctccaaacgggcaaggctcatgcgccaggcccggttcccggtgcccaaaagcctcgacggctacgacttcgcgaacgtgcgcctgcccgacggatacaccaaggagcagctgaccggcctcgatttcgcggccaaggcgcaggacctcgtgttctacggcaagacgggacgcggaaagacccacctggccaccgccctgggcatgctcgccatcgagcaaggcaggagcgtgaggttccggcagaccgcggagctcgtgctccagctcggcaaggccaaacgcgacggcgccctcgacagcctgctcagggacctcgcccgtgccgacctgatcatcctcgacgagttcggctacgtgcccttcgacatcgacggggcccgtctcctctaccagatcatcgccggcagctacgaacgtcgcagcatcatcttcaccacgaacatcgagttcagcaaatgggggacgatcttcgccgacgacaaactcgccgccgcgatcatcgaccgcatcgtccaccacggacgcctcatcgaattcaccggccccagccgacgcgtcagccaagccctcatgttcggcaagacggacaaccagtaaaacaaaccaccggccggcactcctcatgccgaaaaccgaaaaaaattagtgacgaaacacgaaacaccgacttgactaaaaacaatgcgaatcgaaggcctctggattatgggaatccaaactcttatccagacgcattcactcgccccgtctggacggggcagcaaaaccgatataacggccgttatcggctcttcttctatttcgaaaccataagaaaagcgtcaaaatcaggttttgagcaaggctttcaagtcacgaacaggtgggaaacctgtgaagagtacccctgaggtacgtgacgggactgggcgtgtctaagggggatgcaaggatcagcgctatcagataatgaacaggattgggcagctcctgtgtggttagcgctatgcattgaaaatgccaattcggggttcgtttaggggggaaaggacgggactcgcatgccgaccacaggtcgatcgattgcaaaaagagccgataacggccgttatgcaggtttggcgtccttgcggaagatcgcggcatgtcctgctacatgttgatgtttctgatatgcactttaggtgtcgcattggtcatattaccgatactgccattattcaaatcagactttatctgtaaccccaccttatatctgggcttgtcggtttactgttttcttttgaaccagcattcgttgtactgtcaattcattgtcagcatgaatgagattccctattccaggggcgtatctggcatcaactgttgccggagtaacgttgacttgtctgctgtgcggatggatgcattggggagcttggggcctgatactcgggcaagcgattcctcaattgtgttacaacaattggcattggccccaatatgtgtataaaaaaatcggcggcacatacatacagagcataagcacgggaacacgttggttcgtgaagaatatcactgaaatctgcaaacgtcgacattaatccttagctgcctgtcattgacgcaatgctgacatgcagcacttgaatttccatatgtttcaatatcccaaccaacaagacaaaggagaagcacgatgagtggttccaaacgagtcgagtggatcgacgtggccaagggtgtcggcatcgtactggtcagtttcggccacctcaggaacggtgacggcgaaagcgtgtggctgcccgcattggatgcgcccatcgacgcgatatacctgttccatatgcccctgttcttcctgctgggggggctcacgttcagtaggaggggcgggttcaaggcgttcttggtgcgcaaggccaagacgttgctggtgccgtattacgtgttctccctgtacttcctcgcgaaaccgttcgcgatactgctcataccatccatgcgcgcggcctttcagacgagccacgactacggtattgcgcaccagttcctcgacgtgctcgtcatgggcaacggactgtggttcctcatggcgttcttcgtgggcgaatgcctgatgtacgggctgaccagcctgactgataacgggcgcgtgcttgccgctattggaatggcgtccgtcatcctgtcgacattcgtctcgtcccagaccggatggcctacactaccctttcagattgtggccggagtcaaggcggctggctacatgtgcgtcggatacgtgctgaaggaatggctcaaagccattccgcgcggaagagcgggcgtatcgtcagcttgcgcggccatagtgttcctgacgttggcggtaccggccgtggccggaatcgtaccggatggtccggcgctgctgaccgcatcggtcgcggcggcattccttggcacgttcaccgtcatctggctgtgcatcgcggtgggatcatgccggatgctggcctatatcgggcgctacagcctcgtctattacgcgctgaacgcattgacactcaacatcatgaaaatcgggcttttccgcgtcatcggcattgacgtggcgtccgcaccgtggttttcacagcttctcgcgggcctcgcagccaccgccctcgcgctcgtgatacttaccatcgcgaaccttttcgtacaacgctggatgtggtgggcgataggcaaaaacgcccataacccggtagggggctgcggacgttttcttggagactgagcgaaaggtttttcgtatgttcagtcttgaggaacgagagcgtgcggtggggttgtatttcaccacgccgatgacgacggcccaggtggtggagcatctgggttatccgaccaggcagtgtctggagcgttggctggcgatggattcccggtatgctggtcatatggccaaacccatcatcccactggagaccaggcgaagggcagtcgagctggtgctgggcggcatgcagcagaagcaggccgccaaacagctcggcgcgggcgtcggcgcggtgcatggctgggtcagggcgtaccgcaagggcggcatggccgcgttgcagcccaaaaacaggaacgccgcgcagggcaataagcccgctggctcccgtcgccggccgtccgcagccgatgatgatgacgcggaggcgttgcgccgcagggtcgaggaactggagccggggaacgcgttgatgcgggaggtggtggaggctcgcaggaaaagacccgggcgccgacctgcggcgcctgtcgaacagggagaagaccctgccggtcgaccgtctgaggccggcgtgttcgcccggctcgatgacatgcttgcccggcatcgcgccgagcggctaccactgccgccacgcccggctcggcgttgacgaatacgccgggctcggggcggaggtggccggggcgttcgccgattccaagggcaggtacgggtaccgcaggatcaaggcggtgctcaagaccggcgtatcggagaaggtggtccgcgggatcatggcggaggaagggctcgtggcgcatgtgcccaagcgacgcaggtatagttcctacgagggcgagacgacgccggctcccgccaatctcgtcgaccgggacttcacggccgagcgtccgaacgagaagtggctgacggacatcagcgagatcaaggccagggacgggaaggtgtacctttcgccgccggtcgactgccacgacggcaagatcgtcgcgcatgccgccgggttcggtcccgacgcggagctggccaaccggatgccggaggaagcggttgccacgccgcccggggaacgcgcgtcccctggtgcattccgaccgtggatgccactgccggtggcccggatggctcgggctcatggaacgcttcgggctgacgcgctccatgagcgcgaagggctgttcgccggacaacgcggccgcggagggattcttcggcaggatgaagaccgaggcggtctaccccgagaagtgggaggaacacacccgcaacgaggtgctcgccttggtcgatgagtacatacgctggtacaaccacgagcgcatcaaacagtcgcttggttggatgagcccggtacaataccgtcaaagccaaggaatggctgcgtgattatctccaagaaaacgtccgcagccccctagtgcccgaaaggttgcgcacttttggtcatgtccgtccatagcacgatgaccagttcgcttcccccagcgtgccgacaaaccggagcatgtcgaggttccggcgcgcggtacgccttccgtccgccggaacgctcgtatctggacgtccgacgatttcgtcggcctgaagcgtcggggcatcgcattgagcgcctcggacgccttctgtgtgacgagccggtcgagcctggtcccgggcgtgtgccgatcaatccgcatggtattctcgggcatggttctatcttctggttttcaaccgcggttctttcgttttgacgaatgaagaaatcgtgcacaggacgcgggccatgcctttcacatcaaaggcggaaacccaaagcacgcaagaattcggacgttaggggctgtggacgttttcttggaggccgaacgaaaggatttggttgtgttcagtcccgaggaacgcaagcgggcggtggaactctatctcacgacatcaatgacgaccgccgaagtggtcgaacatctcggttatccgaccaggcagtgcctggaacgccggctggcgaaggatccccgttatgccgggcgtatgaggatccccatcatcccccctggaaaccaagcagaaggcgatcgaaccggtatcgggcggcatgcggcagaagcaagccgcccggcagcccggcgcgggcgccgtgcccccattgggtcaaggcacgtctttcgtcaaataaatctgcgtgtcgtcaccagttaatctgaacaccatcggcgttcaaaatagacaccgtcaccggcggtccggctggttcccctcttttcgtttatctcatcagggagtggctgttgcggtacgacttgccacggaacctgacgatccttccgtggtgcacgatgcggtcgatgaccgcggcggccatgtcgccgtcgccgaacacctcgccccaccgtccgaactccaggttcgtggcggacaccacgctccgcttctcgtaggaatccgcgacgacctggaacaggagcctggccccgtcgatgtcgatcggcaggtagcccagctcgtcgatgaccagaagcctggcgcggcctatcgcgcgcagttccgcgtcgagccggttctcgtccctcgcccgccgcaaacgcatcaccagcgacgacgcggtgaagaacctcaccggcatgcccctctcgcacgccagcatgcccgtagcgatcgccatgtgcgtcttgccgcatccaacgtcgccgtagagcacgaggtcctcggcccggtccacgaaaccgaggtccatgagctgctcgcccccccagtcggcggggaacgacgccatgccccagtcgtatccgtcgaagcccttgacgcacgggaatcccgcgttcctgatcagcttggcgcgcctggattccgttcggctggcgttctggattggctacaatgtattagacagtccgatgagggatgaatgatgtgggattggaggccgacgatggccggcccgaaacatccccgtcactacggcgaggcgttcaaatggcagatcgtgcagtcgtacgagagcggcaagccatcccgggaggtcagggccgggcacgacatcgcgcaatcgactctgcagcgctgggtccagggcatccgcgacagtggctccacccgggccgcggacaaccgcacgtccgagcaggacgagccggtcgagctgaggagatgcgaccggcggttggaggtggaggtggacgtttcagaacaagcggcgccggtattcgcgcgaaggcaggcgcgatacgggccaacgccgcccgctgcccgatatcggcgcagtgcgggataccgggcgttccccgctccgcctactactggatgatcgagcatcccgagacggagcgtgcggatccaatcgccggcgacgtgcgctcggcctggcgcgatggccgcgaacgctacggcgccaggaagatcaaggccgccccggaaaggaggggcgtcaccgcgtccagcagacgcatcggcaacatcatgcgcgaacacgaacaggccgccgaagaaggagctcgcgtaccggaaccactgcaccacgatcgagcagctgaggcgcgacctcaacgactacgtgtggcggtccgacaaccagcggctccactccacccccggataccggagcccgaaggaattcaccgaacaaggactcgtcctctaagaaactgtccaacacaccgttgccaatccatacatgatctggttccgggacaagaggatcaagaccgaatacggcacgggtatcatggacctgtgatgcgggctcggccttgtggcataatcagaagaacgggaacaaggaagtccaacaaaacggcacgattcgctcttggttgaaaatggacctacaggaaacgcctcctcactgtttgaatttcaacgattcacaacggaccggcgctcacgagaacaacgcaagagacagaaactgtgcgttctccaccctctatagtgagtctgcaacctctgctatcgtagtcacagttgtcggtcgataacaacgtattcattgtctgtatgaatcgatgatggcgtgtggtatcactgtggctgtggctacacgcgaagtatgtcgaatgtcggcggaccgtgtatatatgccctttcaagtgggaaaggcattgcatcccccgattgaatttggtgtgacgtgtgacaattccagagataatatctcgtcgctgaatggtcggtattccgaattgaccggttcgtgttggttgcaggagagtcgtccatccctatatcagagtttggtgtactatcgccgtcatttcgtcaagcccgacaatccagaattgtatggaggtgacgacaagctttttgccgttgcatcgcagcgaatcgactatgaatcgttgcttgacgagatgggggaggtaattgttccgaccgaacggaagtgctatattgaaactgtgtattcacattgcggacgtattatgaaggaaggacagttggaagctactaggaaattcagctcatcttttcaacatgtagtgatgcacaagggtatatttgacgaatactgcagctggatgcttctattgtggtcgaatctacgaaacgtattgattctttcgagttgcgctgtcttggaacgtatcagtgagattctccttgatgtgtggctgaataccaaacgttatccatatgcagaaatgccgattgtcagtcctgagccggtgaactggatgaaggaggggactggcttcctgatggcgaaatttgtcggtaagaaatacgtgaagagctgctgatagacgtatggacattcctgggtaccctctgattagcgttatcgtaccggtctataacgtggaacgttatcttgaccaatgcatgcacagccttgttaggcagagttatgccaatcttgagatcatcgtcattgacgacggatccacggattcatcgggaaggaagtgtgatgcgtgggctgaacgtgattctcgtatccgtgtgatccaccaggccaataaaggtttggccgatgcccgcaacaccggactcgacactgctcgaggggactatatcggttttgtggactccgatgactacacgctcccagacatgttctctactatgatgcggaacatatgggaatccgaagcggacctgtccatcatctcttatgaacgtgaaaatccggacggcggtatctatagcaatgctttgtttggacagaaactggtgatgacctccgaagacgcgttcaaatacgtcaacatgcacggatatttctatgtggtcgcatgggacaaacttgccaaaaaagagctgttcgacggtcttcgatatccgcttgacgcagaatatgctgaggattccccggtaacctatcagctgcttgatcgtgccgaacgaatcgtctacgattccacacccctataccgatatcggatgacgaaaggaagccaatcccacggcattaccgataaattcgcgcaatccactggcaacatgctggaattggtgcgtaagaagtatcctcaagacgaaccgtatgccgcgtatggtcatctggaatccatcgtaggtacctacaatcgcattgtccttgcgggcaaacgcaaggaatgggctgaattcgagcgattcgcacgaatcagactacgtgagctgatgccgttggtcgaaagcgctaagcttatgtcaaaaagccaatcgctgcagtggagactgcttgccgtttcaccgaccatgtatggcgtaatgtaccggtgttacaaacgcagccatcctgaaatttcggcacattaagtaggttgtaatgaacactctctttatgctgacgtgtatgattcttatttttcttttcgcctatttcgtctcggataggagcttcgtcaatcctattgtcttattttgtcttcctatgattgtttcagttatatatggattgcaatattattcagggtggagattcaatgtttcttcggagacaatgtttttggtcatctcctcttttcttgttttttgctttgcggtttttctagtttcggtcttcattagagatcgtggttttagaaggaaaagtgatggatataatggaataaatacagctttcctgcttagagataatgtatacgtattactgtttgtacttcagatttttgccgctataatctgttttctacaggaacgtaagattgttctggccaatggttatggtggtggtccatctgaagtgattggcagctataacaagttgatgaaatttagcgatgatgatgtcaaccttccaggcttcgcttcattgattgctggattgcagcagggcatagcctatattcttggctatcttttctcaatggatcgaatacatggcagccggaaaacatacaaagtcattttattcgttctgactgtagttttgttgacggtgtcaggaagccggacaaattccataggtctattgtttggcacgctggtaatgtacatgttgttgaggtgcagagctggcaaagcgattacgttatgcaatataaaagcgaaatatgtgctctacgtcccgatgagcgtcgccgtgttgctgattgtgttctttgaatcattgactttgcttggtcgtaatgaagaatctgatttcttctactacatagcgatttatttaagtgcccctatgaagaatttagatcttgcgataactcacggcattgtgcatagcgactattgggggcagctttccttcaagtatctgtacccgtcatttgaaaaatttaatctagtcccagttggatcgacgtatggtgcattcccttttctatcgttcaatggttatttcatgggaaacgtatacacgacgttttacgcgttacttgtcgacttcggatttgctggatgtctactggcggtagcaattatggcagccatgtcccaatgtacctattcagtggcgctatgttcacggaacagttattctatagccgtcatcttatatgctttcatttcctttcagttgtttatgtcttttttctcgagtaatttttatcagaatatttttaatactggttttattaagttcattattccgattgtgttgttcaaatactacgtcagcattaaaagtccacaggaaaacaagcttttatcatgaaaattcattccgtgaagttcaacgtgctgatgaacatgatcgtcaccacgtcgtcgctgatttttccgcttatcaccgttccctacgtatcgcgcgtgctttccactggcggaaccggtcatgttgcgttcgcgcaatcggtttcgtcgtacttctctctagtggctttgctgggtgtgacctactatggtgtcagggcttgcgccagcgtgcgtgacgacggaacggagctttcacgcacggtcaaggagctgctggtcatcctgggctgttccaccacagtggtcagcattgtatacgtggcatgcctgttcaccgtaccgaagatgaacgcacagttcgaactgttcctgctgtttggtctttcaatctggttggcgtcgttcggcgtggaatggttctatcaggcactggaacaatacgaatacatcaccgtgcgaagcgtatgcttcaaaatcctggcattggtgctgatgttcgcttttgtgagggaacgcggcgattatgtgacgtacggtctcatcgtggtggtggccggctacggatcgaacgttctcaaccttctacggctgcgcaagttcatcgatctgcatgatggtgcgaaactcgacgtgaagcgccatttcaaacccatgctgtggtttgtgatcgcatccatttcatccggtatgtatatccaagtggacatcgtcatgctcggtttccttggtaccaccaatatggtcggcttgtaccagctggtctccaaaatcaagtccgtgctggtgactgccgtcaattcggtaggcaatgtcatgttgccgcgtctttcttactaccaggcgcaaaacaaggaacgccgagctggcgagcttatcgcgaagaacatgaatttcgtcatggtattcggctccgcgattatcgtattgctcatactgctcgccgaccccatcgtggccttgctgggcggttcggatttcgcggactccgaagtgccgctacgatgcgtcggcgttgctgtgatgttctcggcaatgaatatcgtgctggccaactacatgatctccaaaggcaaggaacgtagttgggctacagtcaacgccatcggccttgtgctggccgttgtcgccaactgtgtgctgattccccgcttcggtgtggtcggctcggcaatcagcatttccttgtgcgaagcgttgatgtttgccatgcgttcctacgtctgccgtgagttcctcagcggtattcgtggattaatcgacccgatccgtatcttttgctcagccggcttttcggggaatgccacatacatcgtgcttgcattgtgcggctgctccgcatggaacgcattcctatggctcgtgtgcggtggaatccttttctcaatcatctacggcacgtccctgctggtttgccgtgaacaattcgtaacgggcgtgatccgtccaattctcaacaaaatacaagatacaaaggagcaggcatgacgaagtatgtgatttgcgaacgttccctgcaccacgctcacgctggttccaaagcacgcgatgacattcgccagttactcgaacaggacgcatggaaaccgttcgaagtgcaccccggagaaaacaaagggtatgtcgacaagctgctatgcgtcggctataccatcgccgattggaaacgattggaacgtaccgtccaaccggcggatgtggtgctgatccaatttcccctcattatgtataacaaggtttccttgtacgctttgccttccgtacgcagaatgaaggaacagggagtacggttcatcatgctggtgcatgatctggaaagcctgcgaggatactccttcactggcttcgacaaacagtgggtggcagaggccgacgctttgatcagccataatcctcgcatgagtgaggtattgcgagaatatggggccaaggctccaatcaaggaaatcggcattttcgattatctgctgcctgatgtgacaccggtgccgccagaacggcgccatggcatcgacatcgcaggaaatctcagccatgataaagccggatatctctatcggctcgccgagcaatttcctgacgcggatatcaacctctacggtcccaaattcgactccgaacgtggtccttccgaatggtatcggggcatctgtacccctgatgaactgccgaacaagctccaaggacgattcggtctcatttgggacggcgacagcgccgaaacatgtacagggttctacggcaaatacctgactgtcaacaacccccacaaactttcgctttacttggcttccggcaaaccagtgatcatctggaaggaagcggcgctcgcgtcattcgtgacggaacatggcgttggaatcgctgtgaacaccctccgcgaagccatacaggcggaacatgacatcgacgaagaagaatacctcacgatggcgcgtcgggcggaggttttgggcgctcgattgcgtgaagggcattacgccaaaaaagtcatggaagaactgcgatcaattatgccggaactacaggaaaggcaatgacaatgggtgtgaagcagcagatcaggaaaatggtgccaaagcatgtgtggcgaacattgcagcgtgccaaggcgaatatgaaactgaaatcatattacagccggcagcgcaagcgattcctgaacaattgcgccggaccatggaacagcgaacagtccgaacagcttcgtggaacgatggtgtattatatccatcgcatcgaaaaaggactgtcgcaccagtgttttcgcgacggctttggcagatccgcgttcagcgagctcaaaaccgtgatggaacaatggcgcaagcatagctatccggtggacgatgtgacataccaagtcgcgcagaacgtcatccgggcatacgtgcgtaagcatcgcgcaattggaaaaccggttccccgattcgttggcgaatggttccccgctgaaatcgcttcagcggacaaaccatacgacagtgccgccgaagctggaaccaaaaccgttcgtgccgccgacaaacgcaacaacgcgtcatcggactacgcgacactgttcgccggacgtaccagtgtccgcgaatatgcggaaacggacgttgacaaggaaaagcttcacaacgcggtcgcgatcgccatgaaaacaccatccgtatgcaatcgacaggcataccgcatactgttcatccgcaatccgaaattcattgaacgagcgctgactttgcaaggtgggtggcgcggatacagcatgccgcccgtactggcgctcatcagcgtggacgtccgcagtttcgtcagtgtcgaggagcgtaacgagccatacatcgacggcggactgttcaccatgtcattcctcacggccctcgaatacgaatcgctcgcatcatgcccgctgaacaccatgatgcgagcgaatcaggaacaagagatacgcaagttgctgggagtgcctgattacgaagtgcttatcgcattcgtggccatcggtaatttcccggaatccatcgaatcaccggtatccttccgataccggccggaattcgtcacacgagaactgaactgaccatgaccgaactcgtcagcatcatcattccggtatatcaaaccccgattcagaccttgcacgactgtgtgaaaagcctgcagcagcagcgaggggacgactttcgtatggaagccgtcatcgtcttcgacggaaaaccggcgttcgatacaacttccataccgacatgggccacagcatccatgaacgtccataccgaaacaatcgaacatgcaggcgtatcggcggcccggaatgccggtctacgatcagcgagcggacagtgggccatgtttgtggattcggacgatgcgctcgccgaagacgccgttgagaatctgctggaattcgccatgcagcggcagtgcgatattgtgatgggagcatatcgtagcgtactgggggcgaatgtcgatgcggatgccgaaacgcatcattatctgaacgaaaacaaggttttcgaaggcttggaatgtgacaagttctgcgaggacatgcttcgtccgcaacggggaatcgccttggcatggggcaaactgtaccgcatgtccgtactgcgaagcgtccaaggattcaacgaatccttgagcttgggggaagacgcggaattcgcattccgtgcgtgcgctgcggcgcaacgtatcggatatgtgaatgcaatggcatatgagtatcgaaggaatgcgcaatccgcggtgcggacgttccgagccgactatgtacggcgcacggtgaaaggaatcgaagcgctgcaggacaccgtacggcagatggaacccgccgatacgcgggaagcctacatgcagtgtcttgatgattatgcgctgtttcacctgaccatcatcatggtcaactacctgtttaatccacaggtaccttggaatcgcaaggaacgggaaacccgatatcggcaaaccttgaatctaccggtattccaagagccgttgcggcgatatcgtggaggcagattcccgataaccagacgagtggccctgctttccatgaaatggcatctatatgacatcagcgctgcgatagcgtgggtgcgacacaggcaattcggcgactgaacaataaaaccaacaaacgaatgagcttgaaacgaaaggaacacgacatggccggtcatccgctcaatatcggaatcatcacctaccatgcggcctacaactatggttcggtgctgcaggcgtacgcaacacagacaaagtttgcagacatgggacacaacgtcaccatggtcgactaccgctccgaagaaggcaaacgatactatgaacgtctgtatttccgcggacagggactgaaatcgacacttgccgatctgaccatgctgccagtagccggcaagcgcaaactcagaatgaagcgtttcgaacagttcattcacacgaatctgcagttgagcgcgaagcaatatcgcgctcctgaagaacttaatgagctggccgaaacattcgacgttgcggtgagcggcagcgatcaaatcatcaacaagcattccaacgaattggcacgtgtggattgggaatacatggatccatacctgttgaagtggacgcgccgcagaaaaatctcatacgcttcttcgccggctaccatgaacgatgaggaacttgaccatatcggtccggcgctcgcccgattcgatgcactgtcggctcgcgaacggtccgcatgcgcgcgtttggagcgagtgagtggtaagcatgttgagcatgtgtgcgatccgacgttgttgctgacggcgaatgagtggatgagacacgttccagcatgccggaagacggtggtaggggaggggccgtacctgctgttctattcgttgcttcgtcctaagcgtgcggtgggcgtttttaatcagttgaagggactgtccaggcgtattggcatgcgcatcgcagtgttgacgccgatggcgggcaatgtaccgaactgtgcggaattgattaatgtgttggaggccggtcctgaggaattcctctctctgatgcgtcatgctcaggcggtgcttaccgattcctatcatggaacgctgttttccatcaactttcataagactttctgggtttataccgaaggtacgaaagagcatgagttggacacccgtcgtgggcaggtattgcaggaattgggattgacggatcgcatcatcaccgacttcacgcagattcctgctgttgctgtaacgaacaaaggccaggtgattgatttttcgcaagccgatatcgctttgcaagccatgcgcgataggtcaatcgcatatctcggaagagctgtttatgcggagactatatccggataatcggtatgagagcaggcaaaaacgacatagaacggcataagaagggaaggtccggttccgttgtcatgtggaaccggaccttcctttataggatttcggttacttcactataatggcgagttaaagtaacgattgtagatagttgcgctggtttgaaaggcccgctatctatttagaagtgcaacgcccttgttcgttggttaattctagcggttcatcggtgaatgcctcggccggggtgcggtagccgagcacccgcatgggacggttgttgatctcgtccatgatggcctgcacgtcgttggccatggacggttcgatgcgggagcgtttgggcaggtagcggcggatcacgccgttacggttctcgttgccgccacgctggtacgagctgtacgggtcggcgaaatacgtggccatgccggattgttcgcgcagccgcccgtggaggcgtgcctgccgatcagcccgacaatccgccgcatacccgatcgtggttgtaccagtggatgtactcgtcgatcaacgcgagcacctccccacgggtgatagggggctgcggacgttttcttggagataatcacgcagccattccttggctttgacggtattgtaccgggctcatccaaccaagcgactgtttgatgcgctcgtggttgtaccagcgtatgtactcatcgaccaaggcgagcacctcgttgcgggtgtgttcctcccacttctcggggtagaccgcctcggtcttcatcctgccgaagaatccctccgcggccgcgttgtccggcgaacagcccttcgcgctcatggagcgcgtcagcccgaagcgttccatgagcccgagccatccgggccaccggcagtggcatccacggtcggaatgcaccaggggacgcgcgttccccgggcggcgtggcaaccgcttcctccggcattgtttttgttcaataggaagttgaggttttagtcacgaaggtttttcgggtttaggcggaaaggcatgccgaccacccgtgggccttagcctgatggtgcttctagttccattcgggaaaggtccggaaaggcaatgatcagcatgccccaaatacagtctatccgttcgcgtcgcaggaacggtgagtccatcgcctcgatagcgcgcagcgagagggtcagcgagccgaccgtgcgcaagtatctgagggtcgacgacctatcggccaggccgcccgtgaggcgacgtcgtggttcggtgatcgacgagtggctgcccatgatcgagggcatgctcgccgaggaccgggagacctggcgcaagcagcggcataccgcgacccgcatccatgagcggttgcgcgacgagtacggggccggggtgtcggtgtcgacggtgacccggaccgtggcgcggctcaggcgcgaggccgcggcggagcgggaggccggtttcctggacctgtcgtggcatccgggcgaatgccgggcggacttcggccaggtcgacgtgcgctaccggggcgtcgtgacgcgaatgcggcatttcgtgttggatttcccgtactcgaacatcgggccgagccagctgatgcccggggagaacgcggagtgcacgtgccaggccctcaggaacctattcgaatggctgggcggggtgcccgaacgcatcgtgtatgacaacgccgccggcgtcggacgcaaatggttcgacaggatccgcctgacccgcctgttccaggcgttccaggcgcactacgggttcgagtacacgttctgcaacccgtactcgggacacgagaagggcggcgtcgaggcccgggtcggggccgtgcgccgcaggctgttcgtgccggtgcccggcgtatggaacctcgacagcttcaacctgcgcctgcccggccgctgcctcgaactgggggacaaggaccactacaggaagggcgagagccagaccggcctgttcgacgaggaccgaaaggcgctgctgcccctgcccgccaagccgttcgacgtggtcacgtggacgaggatgaaggccgacaaatacggcaacatcaccgtccagggccgccaccggtacgcggccggacccgaacacgccggccatgagatgatcgtcggcctgagggccctggaggtggagatcctcgatgccgaaggcaaacgcgtgatcacgcatccgaggtcctacggggacaagccgaccgacagcggcgacccgtcgagccagctcgggctgttgtgcgaccggccggcggcctggcgcaacagccgggtgcgcgacgcgatgcccgacccgcttcgcgaatggatcgacgcgcaggacgaggccacgcggcgcgactgtgttttgatgctcctatacattgtcaagcgtttgggtgtgttgttttgggttggttgtcgagtgtatccactggatggcccgttgctcgagttcgggaaggtcgcgtgcgccgcgttcgatctcgctgatgcggctcgagggcacgcagagcgcctcgccgatctgttgctgggtgatgttccggctgacgcgtagttcgcgcagcttggcgccgcgttcggccggggtcccgcgtccgacctcgccgttgcgtatgctgatgagcgcccggtatgcctcgcgggcgatgaaccgtttgacgcagcggatgatctcgagcttgcctttgccctcgcgggtctttttggccatgtagtcgcgggtcggcttgtggtatcgcaggcggacgatggcgatgcggtgcaatgccatattgccctgccggttgccgcctttgttgagcctgtgtcggttggtcctgccgctggacgcggggatggggcagacgccgcagagtttggcgaacgcggcctcgcttcggatgcgttcggggttgtccccggcgacgatggccagggtcgcggcgatgacggcgcccgcgcagtacatgtcgagcagcggcctggcgtgttcctcgaggatcaggcgcatgcgttcctccaggagaccggcctgccgtttgagcgccttccatgccttggcggcggatttcagcgcggccagcacgctccgctcgaccaggccgccggccggtctgcattcggcgagcctgttcatgcgggtctcgctcctcaacccccggtaacgttccctgatgggttccggggcggtgacgagcagcccgttcgtcgaattggagatcgcggtcatcgccgacaccagttgggatcgctgcgcgttgaggtggcgcagtgcctcgacccagccgtccgagcttttcggcaggctcgtgccgtcgccggccatgacgctacgggcagcggcgaccgcgtcgaggggatcggacttgccgtccctgcggcgcacgcttcgcctggggcgcagcacctcgcgcacctcgtatccggcggcagtgagacgacgggccagggccgctccgaacgagttcgtgccctccacgcccacggccgcgaccctgcccggcccgggcagcatgccgatcagcctgtcgtatccgtccgggtccgccgtgaacgtctcggcgcccagcggcctgccccgctcgtcgagcaatgcgatggtgtgcgtgtccgtgtgggtgtcgatcccggcccacaccacttcgttcggcggcgtcatcgtcgtcgttcctttccatgtgttcggatgcctcccgggggcttgcggcgcagacaggacgttgacggggcacgctaccatggttcttgcgggatccgacgggagcggccacgctcctatgaggtcatgcatccatggcccacgggtcggcggccatgggcgggacaaatcaaaataaggacagccaccggaaccgatggcgtcagtcaaatgtggggtcaccgcccaagccgtcatccaccattatcaccgatcagaaaccggcataaccattatcaacgtcaaatttttgtgggccgtttcggcgtttcttttagtccgtttgagcggttgtttttaggccgtttcggctttggccagtcctgtgggttgtcggttattgcatgagggcgtgggtcttgcgccaggactcgccctcgaatctgatcatcctgccgtggtggacggtgcggtcgatgatcgcggcggccatgttggggtcgccgaagatcctgccccatccggagaactcgatgttggtggtgtagatgatgctctgggtctcgtacgcgttggtgacgacctggaacaggagcctgctgccttcctcgtcgatgggcacgtagccgagttcgtcgatgatcaggagcggggttctgccgatcatggcgagttcccggtcgagccgattgtccgtctgggcgcgtaggagccgcatgaccaggcttgcggccgtgtggtagcgcacgggcatgcccctgcggcatgcgttcctgccaagcgcgatggcgaggtgggtcttgccggtgccgggaggcccgaacaggacgaggtcctcgtggccgctgatgaattccagggattcgatccgctgtcttccgtagtcgacggggaagcggatcggggtccagtcgtagccgtcgagttccttgtcggcggggaatccggcctgtttcaggagccgggagcgtttggagcgttcccgggattcgagttcggcattcatccattcctccacgaactccatctgggttggcgtggcgttggcgagctggtcggcgaggatctggcgggtcaggggcaaccggcgcgcgaggttcatgatcgtttcgatcttctcgccggtggacgcgcggcggcgtttcatgtcgggcatgacgaccggtgggcggtggatccccatgtttacgcctccttcctttcccgcgtcccacgaggctgcatgaacacgtcgtatccggtcaggtcgggtgcggtctgctcgtatggcttctcgccggaggcgatgcgccgtgccatggtggtcaggctcgcctcgtcgagcgggtgcccctgttcgaccagatgctcaccagcctcgacggccggctcgaacccgcacgcgtcgctcgttctggagatgagccggaacgcgttcctgcgcgccttggcgtccatccggtcgatcgccagacgcagtttgtcgggaaaatcatcgcggatggtggaatcgggccatgcgttggtcttgcggcccagtgcgggcaggagcgtggcggggtcgcggatagtggcaggcgaatccccgtacacgcgcggcagcctggcgcaggtgcgcccgtcctgggtgcggatcgtcacgtcgaacgcgcgaagggcgacgtccaacgtccagccgcgccacgagggtccggcgaggtaatggttgccgtcgacctgcacgcgcccgtccttgtcggccttcctgacctcccagcggatcgcgtcgtagggcttggacggcaggggctgcatctccgccttctcctcggcgaacagtccgccgatcggcgcgcccttgcggtaatgcgtctccttggccatcgcgtcgcaccgctccagcatgtaccgggtcaactgggcgtaggactccgcgttgagcaggggcaccatgatgttgcggcgcaggaacccgaccgcgttctccacgctgcccttctcattgcccgagttcggattgcagaacctggtctccagccggtaatgctccacgaacagttcgaacaccttgacgatgctgaccctgtcccacgcgacccggtgaccggcgccggtggcgttgtcgagcaccagcgtcagggggaccgcgcctatgtgctcgaacaccgtgcgcagtcccgcgcacacgcattccgcgttctccccgggcagggccacgcagtagcgcatgttcgaatacgggaacgtcacgaccaggcaatgcacgtcgacccggtccccgccgaccacggcccgcgccatgccgaaatcgacctgcgcctcgcccggatgccactcgagctccagatacccgtccgacgggagccgatgctcctcgcgccaacgcttcacataccgttgcaccgacgagtacgcgcccccgtagcccctctccgaaacgagccggtcgtacacgcgcttggcggtgtgccgctgcttgcgcggcatgaaccggtccgcctccaaccacccgtcgaccgtcgccttgaacgggtcgagcttcgacggcctcgatgcggagtgctccggcttgggagagcaatcctccctcccggcgtatttcgcgaccgtgtcgcgggccacgcccacctcttttgcgatgcttctccatgacacgccatgcgcgtcaagcaccctgatacgttgttgtacggacaccggtaccgtcattcctttcctttcccgagaaaccgaatggtttgcttccgactcgggaaactagtacgggcaggacgggccggtgttcatttctcgccacacgctgaaatggactaaaacctgccgctcatctggagactttccacacgctcacacggcccactttctattgaacagacacacgcgacagcctgcgtgccctgctgcacgccgacggcgagagcggctggcgggcggccgtggccggcatgctcgagatcctcgaatccaccggaggcacggaccgggccggggtatgtctggccgcggcgcgccacgcctcgggcctgggacccgtggcctacgacgaccccgtggacctgagcgaatacgacatcgcctacaccaaggaggacgagtgaaccagaagaacggacggaccgaccccggcccgctgcgcgagcgggcgaggagcctgttcatctcgcaggccaccatcgacgaaacgctcgaatgggccacgccccgccaactggacgccatcgaccgcatgctcgccacggaactggccaacagggaggcctccaaacgggcaaggctcatgcgccaggcccggttcccggtgcccaaaagcctcgacggctacgacttcgcgaacgtgcgcctgcccgacggatacaccaaggagcagctgaccggcctcgatttcgcggccaaggcgcaggacctcgtgttctacggcaagacgggacgcggaaagacccacctggccaccgccctgggcatgctcgccatcgagcaaggcaggagcgtgaggttccggcagaccgcggagctcgtgctccagctcggcaaggccaaacgcgacggcgccctcgacagcctgctcagggacctcgcccgtgccgacctgatcatcctcgacgagttcggctacgtgcccttcgacatcgacggggcccgtctcctctaccagatcatcgccggcagctacgaacgtcgcagcatcatcttcaccacgaacatcgagttcagcaaatgggggacgatcttcgccgacgacaaactcgccgccgcgatcatcgaccgcatcgtccaccacggacgcctcatcgaattcaccggccccagccgacgcgtcagccaagccctcatgttcggcaagacggacaaccagtaaaacaaaccaccggccggcactcctcatgccgaaaaccgaaaaaaattagtgacgaaacacgaaacaccgacttgactaaaaacaggcatccggttggccagctccgcgtcgggaccgaacccggcggcatgcgcgacgatcttgccgtcgtggcagtcgaccggcggcgaaaggtacaccttcccgtccctggccttgatctcgctgatgtccgtcagccacttctcgttcggacgctcggccgtgaagtcccggtcgacgagattggcgggagccggcgtcgtctcgccctcgtaggaactatacctgcgtcgcttgggcacatgcgccacgagcccttcctccgccatgatcccgcggaccaccttctccgatacgccggtcttgagcaccgccttgatcctgcggtacccgtacctgcccttggaatcggcgaacgccccggccacctccgccccgagcccggcgtattcgtcaacgccgagccgggcgtggcggcagtggtagccgctcggcgcgatgccgggcaagcatgtcatcgagccgggcgaacacgccggcctcagacggtcgaccggcagggtcttctccctgttcgacaggcgccgcaggtcggcgcccgggtcttttcctgcgagcctccaccacctcccgcatcaacgcgttcccccggctccagttcctcgaccctgcggcgcaacgcctccgcgtcatcatcatcggctgcggacggccggcgacgggagccagcgggcttattgccctgcgcggcgttcctgtttttgggctgcaacgcggccatgccgcccttgcggtacgccctgacccagccatgcaccgcgccgacgcccgcgccgagctgtttggcggcctgcttctgctgcatgccgcccagcaccagctcgactgcccttcgcctggtctccagtgggatgatgggtttggccatatgaccagcataccgggaatccatcgccagccaacgctccagacactgcctggtcggataacccagatgctccaccacctgggccgtcgtcatcggcgtggtgaaatacaaccccaccgcacgctctcgttcctcaagactgaacatacgaaaaacctttcgctcagtctccaagaaaacgtccgcagccccctaccaccgaatcacgtggcaagctgttgtacgcgctgaatctcggaccacgcgccgcggaacgggcgatcagcacattggttgacttcggactggtggaacgcctagcgagacccgcgagcggcaggcaggccgcctacaggcttcgcgtggccgaacgatacgacgcgatgcaatcggcagtggaacggcgtgaaatgggaatggaaggcgcaagatgaagcccccgtaacatatccaaggaacgccgtcagacgctggaaggaaccagtttgacagcattccgagtcaatcaaatctgaagagattttctcggatgccgactgactggcgcctgtccctatcggtcagatgtctttccgtcagaggtttctttttctccctgactgtccgcgtcttggatctgccaggctgcgagcgagttaaatccatcggtaagccgattgcagacgtaaacaagccgttctttccaatcggtggatgtgcaatctcctaacagtctgcgaagtctttttgacgcatcgcctttcccattaggacgatgcgctgcacctcctccagaacggaaatcctgcacatatttcaggtattcgaagggggatgtatcggctccttgtgattggaaaaacgagattgctaattgtatggatccaattttgtcgtcgacgattcctgagagcttacgtaactgcttcccgtccaaggtatctgcaagtgcttttgtcaaagccaacatcgcattgttgaatgcttcagtgctgtccactgttggcactgcaagcgtgttgatctttttgagagtgtggctatccggctctttccagatacttacgcctagctgctctttgacgttttcggaggctttcttgaaggagagcataagttcgaaaacgggcacatcactgaaatccgagggtatgttgaagtaatctcgcaatactctattggggttcggattgccggatggggtgatattaaacgattcccaatactgcaattcctcacgaggcaaactgctgagatctcctaggtgcgcttcgacaagcccttcagagtttatatcgatgtcaagttgccataggcctcttccatcaatcacgcaggcaacggagcggtccgatacctgatacttgtctggattggctgagtatctctgcaacacttctggcttgaaacaaacttgctcaagcttgtttggatgatttggactggagctagggtatccagaaagctgagatggatcgcagctggcgggaataggcttgccgtccgaggctagcccaatgatgaaactcggatactctgttgttgcttcatcatcaagaaatcgcgggaattgagtgttcttcgcgccatggattatgtattttccgaatagtgctattacgcttttccgcaaagggttttcaggttccttcataaaagtatatgaacaccagtctctgctgttctcctgccgggcatcatcattacaaggaagaccagcataggtgtcatccgtgtataacagcaattctttatcgcagtagtacagaaaagtacgcaattccaacgctctggcttcgagtttccaatttgcctcatcgtcttcgggaacgtccagcgtaaagcggagtagtggtaactctttcccggtcgcgtcagtgtatttccactcatcttttaccctgtacgcatcccaaaaccaaaggaaagacggcaagatgtccacttccggcgttgtgcttcctagagcatcgcgcacttgcgtgaagaagccgtagaatggagctttctctgatcgaaggccatagcagggttcatagccggtcatgcttcgctctgatacacgcaggtcaaatttgcctagtccagggatgctgaaattgtgcagggctttggcgacggaatcgctctcattgtcgatgagcgcacaatgtgtggtctgggtatattccgccttatcgtgcttgttgtcgcattcctttctttcgaatcgattgatgacaacccaggctaggggagtcggggttactgttttcaatcgttcctcgaagagctttgcagttggctggtctagattccattcatcgccgagcgtttcaaccccttgctgcatctatgtctccttctgaagtgttaacagggatgttagaaaagagctccttgagcttcttccatgaaaagatgagacaaggaatcatattctgattcttttaaatcaaccatagcgggaataatcgtctgtgcaaaagcttgaagatcacagatacctcgttgaacattcgcaattccatttgtataatcaaatttgatgttcttttccctctttgaaattggaatttgcgcttcacaggatatgactcgagcattcttcccaaacattcgcagtgtgttgcttttttgaattttagagtccgggatattataaacagttacgctgtcgcggttgtctacttgaactcgctggatttttaatccagccactctatggataaaggtgtcaacattcagcccttcatgcattgcaatatcttcggactcatacatctttttgatatcttcggtcgagtctgagaatataatttgtgtcgttccatttgtagcaattagatggttttcgtcaatggtccagtgccaaaaaggaagatgcgctgactcggagaataaagatggtggtgttcgaacaactttcgctgccttaacagcaactgtgtttgcttttcctgcaatcaaggaattgaagttgtaggggtgtttttgtgcattcagctgagacgtttgtggaagcgtgagttttgcgggtatagatgaccactgcgtattttcgtctgagtgagaaagaagatagtcccatccttcgtcattgagctcgtttcccaataaggcgggtgaaggatagttagctattgccccaccatgtccgcaccataatgcttgataaaacgaatcaatctgatttcttccgtcgttggacataacgtggtgcatcgtttgcaatgagtgtgctacttgattcccatcaagagattctgcagcgttggctccatcgataaaatcttgtgttgtctttgttgccaagggttttgtaaaaagtccgcgcccatactggggtattgggtggttgactattttataaatagcttgttcccgattttgttctgtaagcattcttaaagtcatggtgttgctgatgagggagctgatgggcttgccttgaagttcaggaatacttttatcggtaatttcattaaaatcttcgattgtgagaataatcggatggaaaatgtctaatagttttgcatcctcaaatatccaattaatatctggagttgttcgtatatataaatatctttcttgtttattccagttgatgaccatgtctggaataaaagtatgattgaaatagtcagtatatcggatattcgattctggactgcactgttcgatgtaataccgtgtcttatcttttatggattgaattgtttcgatttcatcgttgtgcatcataggacatcatcatccttcttttcccgtacgatattgtgctattactctcatttcatcttttgaaatagttaggaaatcttcttgctcttttgaaagaactagaatccatatgtcgttggatagaccattgagaaattctttctcttgagaaagagtctcatctgcttcttgagtatctgaaatattcagagatctcaactgatttctcttgtttaggattgcttctttaatttcttctggtgaatgcaactggctccattttgtaaccccgaatggggaccaggtaatccatagaaaaatgtcagtgaatttcggattttcttttctggctacgtagcattttgccaaaaaatcagtgaacatggacaattggtcactggagctggagtagttcttaacctctgcgaagaaattttctccttcgcgagttttgctgtcatcgtcgccttgcccaatgaatgatccacctaaatcaaaggagaaggtgttgctattgcctggccatttataggttaattttttaacggcggtgggatcggggttgacccattgtacttttgctcttaatgtgcgttcgagccatcttttagctcgatgagcgccttcttcacctttacgctgtatttcttcacctgatggcatgaaataactatatctctttttgtggattaggggatttgggatatagatccgagatcttgcgcactttcggattctgccgctgacgtaagaggacctggctgcgttctgcgtgcggttttcattcgctaaaaagcggttggaaactgaggggcagagctatgcccgagagcgtcggagctctgatgattcttgggatacaatgcctctgcgaattgactatctgccgtttgattagcctaggtctccgtgacatgcacggtgatgtagccatgcatttatatagctttaagcaaaatttttgcaataagtctaaaaagagcatcgaagattgagatttgctgagtttcatgtatcatatcgtgacagtagagaaaaatcagaaagccgaggagcggaatgaatgctgctcaacttcactgttgaaaattgcttgagtttcaaaagcgagcaggaatttaccatgctccgcaaaggtcggcacggcacacaagaagagcagggggcatggagtcggattttccccgttgccgtcatctatggcgataatgcagcgggcaagtcgaacctgctcaaatgcatgaattttttctccaatttcgtacgcaatagttttgctcttcgcgagggcattaatacgcagcttttcctgttggaccgtgaaagcgcaaagtaaccgtctacgttctatattgaattcatcgccaaagatgggaaccgttgccaatactggttccgtatcgatgcccacaaggtgctggaggaagtgctgtggatgtttcggtctgcgaccaatcggcgcactgtagtgttcgaacgtgaaatcggaaagaagactaagatcggcgctcaattccccaacatagggaaaatcgctcaccttgttcgggagaacgcgcttcttctcttggccgcggccgcactgaacattacaagtgtgatacctgcatacaacattattgcaaacagtatccagtgctatcccgccgtggatttcgataattccttcggggttttgtacaccgaatccgcaagaatccaggccgggcattgttgctgtcgaaactgatcagagtggccgatctcggtataaccgatgtcgatttcgaagaaaaagacgttccggaagaactgctggaagaactgcgaaagctggaggaaagcggggtgtcgggcagttcggtcccaacagttgatgaggcattaggcgattccagcgcatcgtcttcccctaagtactttatgtcccgcgtactgttcagccatcaaggaaaaggcgttatccgtcagttttgaactgcgccccgtttgttggacgttgttaattagtatacagccctagaccgcgagggacatgctccggaactcctccggggtatgtcccccgagtcgtatctggcgccgtctggtgttccaatggatgatgtacgcatccagcttgcgcttgaaccgctcgtacgagtcgaactcgcggccgcggtagaactcgtccttcaagtggccgaagacctgctcggtggcggcgttgtccaggcagttgcccttgcggctcatggactggcgggtgccgaggcgttcgagctcgtccctccaccatcggtgctggtactgccatcccatgtccgagtgcaggatcggctccgcgccggcgggcagacgctccgcgagcatggcgaacgggcgcctctgccgcccgaggtccggactgcggctcacgtcccaggcgacgatctccttgctggccatgtcgtacacgggcgcgaggtacgccttggagccggcgaccttgaactcggtgacgtcggtcccgagcttggagaacggacgggccgcgtcgaagtcgcgtttgagcaggttatgcacgtggcctccctcgtcgcccctgtacgagttatagcgtttccacgggttcctagagcggatggcgcatctcagtcccatgcggcgcatgaccctgagcacgctcttggccgacaccttccgtccgaactcgtggaccaagcacatgcgtatctgccggtggccgcacccgttcggcgtgcgtccccagatctcgccgaccaatggctcgagatcggcccgcgtcacacgctccggatgcgacaggtggtagaagtacgtggatctggccagtcccgctatcctcaggaggtggtcgagccggtgtccccgccccgcgagcagtcggacgacggcgcttctctcgcgtctcgtgacttctgcgcccgcagggcccggagtttttccaggtacgcgaccttcgccttcagataggcgacctgttcggcgagctcctgctcgcgcgtcggttcgggcttcggtttggatttcgagcctctgggcctgcccttgggcctcggcctgagcgcctccgggcctcccgcccggtactcgcggcaccagcgttccaggggcgcgacgctcgcgatcccgtgcctggccatgaactccgtcttggccatgccgttctcgacgtggtcgcgtgccgcagcgaccttcgtctcccagtcgtagcatctgccgccgtttcctcccatgaccacctcctcgccgccggacctgtacagcatgattcagtttctcgcggtatacaccggtatggcaagccgtctggcgagcgtgttcccgctggctcctgccttgatgagttctagcgcctcgcgccggaacccgtcgtcgtagtgtctccttcgatcctcacgcatacgaaagaaccgcacctccgatcatcgaatctgaatttcttcagtccaacaatcggggtgcggttcacaacgcggagggattcctcgggcgtatgaagacggaatccgtctatcccgagcattgggaggagtgtgcccgtgatgaggtgctcgtcctgatagacgattacatccactggtacaaccatgcgcgcatcaaacggtcgtttggctgtatgagcccggtagaatgccgtcaaaaaaccaaggaagggctgcgtgactgtctccaagaaaacgtccgcagcacttttttccataccgaatgtggcggcgagttcgacgacccggggatcggcgaaccgctcggcgtgttcggcgtcgaacgccccctctcgtgcaagggcaattcctgtggcaacgcggtggtcgagtccacgtgtgtttcggcaagttgccgccccgccatccctcagcccgcacctcaatcgcctccctcagctccatcatgggatgtgccaagcgccgactcttccgctacatttccggacgttttatgagagagtccgcatgacagttgagaacagcactagtgcaaacatggtagattcgcgcagttttccgctacatggcgaaatgagggtcaatttttgccccaggtgcaggctgctttcacttcgagcggttctacgatgccgccataaagcttgcttgttatagacatgccaaggcatatacatgtgtattacattagaaatatcaagaaatatacatatacccgctgtagcgtatcatcaacctagttttattcgttttagaaaacccttgagtgcgatagcatgtagcaagtcgaaaccgatacttgagatgaggtgaagcgatggtggaagagcaaatcgattggaggaagacggtcgaggccattcttgaaaacgccaaccgtcctttcgttccgattagcaagtccttcatccagcagcctcgcggaagcaaggagcgcagcagcgtgctgtcccagttcgtgacaaacggagatctcaggggcttgaaggcctatttactgatcgcggcatccgcaagcagccccgacacggagaacgagtggtacacatcgctgcccctgcaaacatgggctcgtgcctttggatgctcggaaacagccggtagcattgcgaccgcaaaggctgccgccacgaggattctcttgcgacttcaacaacgtggcctgatcgaaaaatcccgttgcggcaaagagcgcaaaatcaagatcaagctactcgcgcaggacggctcgggtgaggaataccagcgacccgcgagccggtacatacgactgtcccacgatttttggaagagccgcttcgatgaggacatcagtctgcccgccttggcgatgttcctcgtcgtccttggcgaacgaacaccatgcgagcttccaacggaacatatgccggaatggtacggatggtccgcagacaccgccgagcgcggcttgcgcgaactgcagcgcattggcctgatccgcaaggaacaacacctcaaggaagccccgctgagcccaacgggaatcaccgtggtgaacgaatattatgtctgcccgccattcgacaaacgaacgttggattcgagacggcacacgcacgagacgaaaggaggagaagcatgagtgaactgatcgcatggggcgacgaaagcgtacagacccaaggcggcgtcatccccacttactacatgggagcttgcatctgcggacttgaagagcgcgatatccgcagacagctgctttccgcgaccaaacgaaaagtctccaagttgcattggcgtgacatgacgctttcggagaaacgcagatccataccagtcatcgaggcattgtcactgccccatatcgccatagccgctacgcccttggatggcacggtcacctccgaacgcgcccgacgtaaatgcctcgaacttctgctgcccacgctggagaaagaatacgggatttcgcgtctcgttctagaatcacgcgaaaccagccaagacgacagagacctcatgttcgtccgtggattgcggagcaggcgtttcatcagccgactccgcgtggacttcgccccgggcttttccgacgctcggctgtggatagcagaccaagcgcttggagccatcggcgatgcgcaacgcggccgccaagacttctcatcattcctcgaaaccctggacatgcgcgaactggatttgcaccatctcgcgtaagtcacgctgcaattcagcctgtggagacatcacactaaggccgtcagccgaatggtatatacttaccagtaagccaacctctgaggaggaaatggaagtaggagccggattccctgtgcatcatgggggccggctcccgcgctatgcggcataaccgcatagcgactacgggttaagggtcaaaaagtagggttaagtaaagaaacgtgggtcttattcgggtgtgttgttggcgtgttggtgggttagtgtgagcgtcctgcccagcctgttctgatgccgaacccgctctcgtaggcgttgatgccgttggtgggtagctgcgctgcggtcatggtgccgggcgcgggcccgtcatgctctatgcattgtagccaatccattcggcggcccgcttctgctgcatgccgcccagcaccagttcgatcgccttggtcctcgtctccagtgggatgatgggtttcgccatatggccggcatactggggatcctttgtcagccagcgttccaggcactgtctggtcgggtatcctaggtgcttcatgacctggtccgtggtcatcggtgtggtgaagtacaggtccaccgcgcactgtcgttcctcggggctgaacatgtgataatcctttcgttcagtctccaagaaaacgtccgcagcctcttatcaatcgtatgtctgatagtcgttggaattcttgtagttgaagtgcttgcgtgcacgggagccatatctatcaagcattttttgtttctgtcgaccggaaatgagatttctggaattgcttggaatcggtcggcactatcggagctacctttgttgcttcattcgattttaatctaacggagattagagagaaacaatgggcggtggccaaagtagtgtcctcctggatctcagaagagaacaaaccaaataaagtgtgtgctggccaggtataaaggtggcgttggggataaatcttatttgcacgctagtatatgcacatgtactacgcgtttattgatgaatctgagtcaccgcatgttccagtacaaagatgattggattggcttgaaaggaaagcatcgtgctgctatcggtatctatcgttctttgatgaatgagataaccgccagtggaagcgttctctttgtacgcggagtccatgaacgtcagcttaagcggcggtacggcgagcatgcgcatgatcctcattctttggcttcgcagtattgtctggagcgcgtcaacttttacgcggagtcagagggcatccggaacatacagattgtggcggataaggtatctgatccagcggctcacgaaggcatgctgaaacggtataagctacttggttcgacggaaggatatgtaggctcggatcttgcacacattgatttcccgttccgttgggaagactcacgcaagtattttggccttcaggctattgatacggctcttttcatattgaaccgcgcggttcgattaaaccgtgacgatatgagttcaaaaggcgaccgagaggtcttgaaaactgcgcagattttacttccacatcttcatcggtcatctggaatctcatacctgcaaaaccgcaaatcgtattacttgatgccggaactgggttataggaactaaacgtggtgttttagactctggtttccttggtcctgaggtggcctatgagggctcttatgtcaaatgccgggctccggtcagcacggccgcgacttcgcgtggcgaggttgttgcccgtccatcgcgtgggcctcgatcgatccggtggccgcgtcgccgagattatggatggccttggcggaggcaacgagggcgtcgaaggcgtcgggaatcagagacgggtctccacggagtgcatccgcgacggcgagggtgatcaggacggccgcgcgggccaggcccgcggtgagtgcgaaatatcgtttcatgcgcgggggtatgcgtcacgtccgagggaggcgtctcgcggatggcgctattccgccgaacacgccgtgtgagcgggcggcatgccgcgctaatcacccgatccccaggggacgtgggcgtggaattcgtcccaggcgatgccggtgccgtattccgggaccccgacgccgacgtcgtcggcgcttccggccgtggatgccctcgccggcttccgttgttcgggacggatgagcgacgatggcttcggattgcggcttttcatgtagcacatccattcgcaggcgcgtctcatgtgctcctcgggcaggccccgatggttgaggagcatgcgtttgagcggcgagttgacgccgccctccaatcggttcgtggtgcgcgccaccgggccgacggcggtcagtgacgggtcgaggaacgcgaacagcctgccctcgcggaacagcttttccagtcgccgatagcagcggcgcagctcctggtgggtccaccaccattcctgtttggatgccttcgggttcgcggggtcgtccctcgcataggtgcgttcggcgatgaagtccctccaccggatgtgccacgcgttgagcgcctcgccccaccgggccgccgcctccgtatcacgcacggcggtcagcttgtcggagagtttcttgagttccctgccggcctcgagcctcggccgcgaggtcaggtcggtcctcgtgttgcgctgcacgtgcaccagacagcgctggatcctcgtgtccggccacgtctcccggcatgcgctctcggcgccgcgcagcccgtcggtgatcagcacgtccggcgcggggatgcgcgaaaacagcgccatataggcggccttcgactcgttcgagcaccactggatgcccagcacctcgccgctttcgccgtcgatggcgacgatcaggcaccaatcgtggttcatgtacgtgccgtccgccatcaccgtgtgatgtctcgccgagcacggcgggatctcgggccggatgccccagcaccattgcacgcgtttgcggaacatgcgcgagcccgtccccatgtcggcctgcctcctgccggaaagcagccatccgaggaagacgcgcaggtcggcgtcgagtctctcgtcgggtctcggaacggtggccccaagcgaacaggccacgcatttccaacgctgggagccggccctcgtcctgccgttcttcctcatcgccccgccgcagaccggacacaaccgcgcccttttcgatttcgtcctcatgcgcccatggaacaggcaaagaacggcagaatcacggatctttaatacgacgtcacattaaagccaccccaacacgcctactcccgcaaggccaaacccggaacataaacaccacgtttagttcctataacccccggaactgtatcctggatatcaaaaatagcttcgggggttcagaagaacccccgagcggacaacgatcataagcatgcctgcttaagctcatcgtctttacagtatacgcttcgataccttaagagtcaaagaacccgttatctatttgtaagtgcaacgtccttgttctcggctgattctagcagttcgtcggcgaatgcctcggcgggggtgcggtagccgagcgctcgcatgggcctgttgtcggtttcgtcgacgatctcctgcagttcgcgtgccatggaggggggggcgatgggcgtgcgtttgggcaggtagcggcggatcatgccgttcctcttccgacaggcgcgaatacacttggcccaaggtgcaacaccccttcgtttggttatctggacaatctccaatctaacgggtgttgcactttcaattagacaacgggcgtatgcgcactctttatcggcatgatagagagtagcgaattgtgattctcgcaatctaaagggaattgatgttgttttttcctcgattcattattgtgcagacagcccatatgaacagtggaattgcatagaatgcgtatgattcaaactgaatatataggtatgcgagaagaatgaaccagcatatgttccgtcggctccatccatgatggaccgctacgtgtactaataccaagagcaagaaggccaaaaagcaaaatagaccaaattcggtaatgaagctggcatagatgctcattgtgaaagtatccgctgggggatttgctaaaccatcgatttcggtattgggcgcaccgccatgggagtcataccattggcgggcaccggcgtaaccagtacgcactgcattagagatattgcctgcgccccatccaaacatgaagtgagatagatcatgtttccatgaccacatgggagcgagcatatggaagattcttgcactcatcgatccgtcaccagcaagtaatccattggtggctaaagagtttagacgcggattgatgataattgcgctcaatccacctgctccaagaagtcctaaagcactgacgaacccagctgttaccttacgtgagtggaagttgattgtcgctatcagccagataaatgtagctaccactgtatccagtatgattcgggtgccggagcccatcgcaattgctccagcggcaaatatcggtatcaatatgccaatcttgcggtcgcgggtcagccagaaaactggcaggagtacgccgaacagatgcatgccgatatagctaggttctgcgaacatgaattgaggacgaacgctcgcatagtttctatacagagcaccccaaaaatatgctcgtactggctgccagttcagatgtcgttctaaagcgatatattgcagtatcccaatgaggaatgccactacatatgcggtgaatagcgtagttaacaatgttcgtacaggtacacgtttaatgcggatcgcgatgtcgagcgaagccaagcacgccagccctaacaatatggagatgaatgactttgcggttgcgctggcgtgtattccatatgactgccagccgtatacggatgtgagcactagtagcaggggaaagaggaagaacggcaggaagcggcgtgcggtatcgcgcaagtatcgccagttgatgattgtgtacagggtgaacaaccagggggagattggcgtccaataggggagtggaatgccaatttttgtgccatcaaatggcagcatggccgctgcggcaaacatcaacatgtctgatggggtgatggtgatacgagtcagcgtctcggtcattgccccgcgctgtagcgcggggcaatgaccggagtttctgcgtttttcttgaactgacttgttgccgagctgcgtattgttcggtgtggacatacttggttccctcccatatcctccatgagaactgtaccagttgcacgtgtgggtgaggtgatgggggttcggtcaaccgttcactttcatgaagtacttttaaactcccaccaagtaattggcagtcgcttacaaaaactgaataatctatgggccaatcagccgtttagatcctctccgtggggctggtgcatgtattgttcaacccaagccatgctggtttttgggaaattaaaagcctgaattatcattaattcgaaatccaggcttttacagtattcgtataatcgcgaattaagcagaaatcactcagccttcttgcggccgcggcgcttcatggtgccggcagtggcgtttgcgacatcaaaaatcacggtcttgtcttccgggtaagcagtgccgttgacggaggcgaaagagacctcgccttctggagcttcgacaagcgtgaagtacttggaaattgcttcaacaagcacagcatccttgatacttacagacgtagtctgcttgccctcacccttgctgaatttcacggcattatccgccttagcggtagtcggcgttacggcaatttgtctggttttatcgttaataaggatcttaacttgtgctggaaaattcagcacttctgcggtggccttattaaaacgtacaacggaatcggtaacggtcattaccgttttgccaacgggcttaactagctgaacttcttcgaatccttgaagcaaggatgccataatatactccttcacactgcataagtattattgacaattttgattgtaatgaatgataatttgaattacaattttatatatcacattctcaatttcaattcataatatggaatagggaaatagtgctgtcgcaaaatattgagtgagaatacattgtgattgcgattgtgtacagttattctgcagtcgtatcaaaggttttggtcattgttcacaaggatacaaaagctcgagaagttccccggtaggtgctaaattatagaccatctgtgagaatttcccgaagaggtaaggaagaacattgaccatcgctgatttgctgcagattgttcgcaagcatctcgcgtctgcgattatctcgttcgtggtggtgtttgctgcagtcgcagctgtcacgttcatcatgccgccgaagtacacggctacggctgaagtgttcgccacgtatgccggtcagtccggcgagacgcagaccaccaacgatatgagctcgggtgccaattatttgaacacccagatcaagacgtatccggaactggtgaagaccgaagccgtgctccagcccgtcattaaggacctcggtctggatatgaccacgaccgatcttgccgatgtggtgaccgctacgaaccccacgaacacgttcatggtggatatctcggcggaagtcggcgatccgcagcaagcggccgacatcgccaacagcgtggcgaagaacctctccgatcagatttcttccgacctgtacaacaactcctcttccaacggctctcccatcaagctcacggtagtgcagagggctcagactcctaccgggcagagctccccgaacattccgctgtatctggccatgggcctgattctcggcctcatcgtaggcattggcgttgccctgctgaaggacatcctcaaccccaaggtggactccaccgatgatgtgcgtgagctgacccacgcctcttcgctgggtactgtgcctcaggcttcgattcttgacgacagccgcccggtcgtggttgctcagccggccggtagcgaggccgaggaattccgccgcatccgtacgaacctgtcgttccttaccaccaccgccacgcagggtcatggccgactgctggtcatcacctccactgatccgtccgaaggtaagaccacggtttcctccaacgttgccgtggctctcgccgaggaaggcaagagtgtgctgctcatcgacgccgatttgcgccacccgtccgtggcccacaagctcggcattgaaggccacgtgggcctgtctcacgtgctgtctcgccaggcgtccccggccgatgtcattcagaagtattggaagccgaacctgcacatcatgcctgccggcaagcgcccggctaacgccagcatcttgctgaactccgatctcatgaaggaaatggtcgagcaggccctcacccagtacgattacgtgattatcgatactgctccgctgtccatagccagcgacgccaccgtgttcggacgtatggccggcggtctggtgctcgtgactggtaagggcgtagtggagaagaaggagctggagaacaccgctacggctctgcaggccgctgaagtgccgattctcggcttcatcttcaacttcgctgatccgaagaagatacactcgaagaactattactactactattacgaggacggcaacaagcgcagctctcataagggtgccaagagcaagggcgagaagaaagcccgcaagtaatagtttggcgtttgccgatcgtcttgcaatatgaaccgtgcggtacttctgtgccgcacggtttactgttataagaccgagttgttggatttatggtgctgaccgtatatcgaatagtaaagaattgtgacattcttgaataccagctggcacgctcggcatagggctggataaactgacagtttggaatgacttcaatgatgcaaaggaatgagaagagcatgggaacagacgaacgccctgaaccgaacgcggaatctggttcctctgcgtcgccggctcgcggtgacatcgtcgataccttctgggatataccgcccatctcgttcgacgagaacgacggcggtattgcgcagggtgacaatggtacggggactgttgcgggtggcgttcagtccgtcttccccagctttgacgaagtattggaatggcctactgcgagtgcggcgaatactgctggcgatgcctcttccccttccgatgctgtggctactgccccgatgacttttgcggcacctgatactgcggaaagtgctcagtcgcctcagcaggataataatgcgacgctgccgctttttgcgccgatttctgatgacaagccgcaacgtaccaatgccacagacgatctgaacatcgacttcagtgccatcgaacagaatcccgagccggtggaggagccggaagaagaccgtgtggcacagactcctcgcggcggtaagggcggcaagaagaggaccaagggcattatcatttcggtgattgttgcgctggtggtgattgcagcgatcattggtggtgtatggtactggcgtttcagcgagcagcgtcaggaaagccatcagctgcatcaggatgcgttgacagcatgtactgaggccgtggaccagaattccaccgctcagaaggcgctggccaaggcgttggccgacgccaagagtgctcaaagcattacagctgatcaagtggctgacggcgcgaccatagatacgctgaagaaggcaattgctgcggtaaagaatgtggaagcggtggagtgcaagacttcagcttctacgtcggacctcaaggaatatgccaagacggccactagccagaccaagaccgccaagaagaacgccactgcgattactgccgcggcaaaggccgtgacggacagcaagaacgccaaggatcaggctaacgctcagcaggcgttgcagagcaagatagccgaggctcagactttgctggacaacagcctgtatgccgtcgacgataattcaacgcgagtgacgctggaaagcgacatcgccaacgccaataccgtgctgtcccagcagggcactgacgtaaaggccatgcaggatgccgtcaacacgttgactgcgtccatggatgcagtcaacacgtccatggcaaactacagtgcagctgttgaagctcagcgagaagcagcgcggcagaaagctctgaatgattattatgcacgattaaggcagcagcagttgttgcagcagcaacagccaacacagtcagacggtacagacaatcaggtgacggaaccgaaagatgagccgaagcagtaagtgattgtgctagcctaaattgttaaaggaaccgcgaataacagtagtgcgcatttccaccatttgctgttgcaaaccagctcaatatatgcgtgctttgtgccgctatgccgtcacggattcgcataatcagttgtggagggcacttcgtatgacacggtaaaagtgacctctagggcgttgcataatgcaaggattcggctgataaggcgcagaaatgccgatgccggtccccgatgattgggaaccggcatcatgcgcatgagttcgctcggcgtttgggccggatttcactcagccttcttgcggcgcggaacctgttgtgtacgtgttgatttggctggcttagtagctcttgtgcttctgccaatacgcgtacgcgccggaaatcgagccatagcggccgttgcaataattcacaaaccacttgaactgggtctggtagttggtctgccagtctgcacctgcggaagccatcttgctgcccggcagcgcctgcggcaggccataagcacctgaagacgggttcgtggcggtgggactccagccggattcgtggctgatgatgaagttggcggcggtgaagtcggcctcggagtagccgttggaaatcaggtagtcatgcgcccaggactgaatctcgccggccggcgtggtggtgccgaggctggcggcgctgggcgaagacacggcggaggtgcccaccagaatcaccttatcgaccggagccttcttgacccaggaggtgaacacattggaggaaacgacctgatcgccggagcgggttaccagagacgtggtctccagcacgcccttctcgccttcggtctcgaccttctcctggcccttgggcaggctcgaggtctccttgcgcacttcattgaaggcgatttcggtgtcggtggtctccgccgtggtgttggcgcggttgatggaaatgactgtggactcgctgaccttggaatccaggctcggagtcacgctgtcttccggatcgaggacgatatcgccggtttccagcacatccttgacggtggtcatgttggctttttcgccgaggaccacgcgagacttgccattgaccttgacggtcacgtaggtggtgctcttgagcgcgccgcgggatgccgaacgggaagccgcaccatcagtggcggagaatgaggttggggtggtggaaggtgtagcggtgctcgactgatagaagtcgcgagatataacgcctgcagtggcaatgagacccactgcggctgcggccgccgcgatcttcgcccactggccccgagacagggttttgacgaatgaggtccgctcagcgtgcttcgacattgcgctccttggttgggtacacactgctctccatcataggacgttgagtggatgaataaaaaaccgtggtgggtgttcgacccgccacggatggcatatgtagtagttagcagtgcaaggaagcgctatatatgggcttttccgcgcttccgttgccgcagtgtgataaggcttactgctgctcctgcgctgcctgctgtgctttggcggcggccagatccagcgccttggcctgggcgatgaggtcgtccagatcggaggcctgcagcgcgccggcctgctggaagatgacctcgccctgcttggcaatcatcagcgtaggcacagcttgaatgccggcagcctgagccagatcctgattggcgtcgatgtccaccttgacgaaagcgatgttcgcattctccggctcgttggacgcagcttcgaaaatcgggccgaacgcgcggcacggaccgcaccaagtggcccagaagtcaacgaacacgatttcgttgtcagtaatggtcttctcaaactcagctgaagtgatggcggtggtggccattgaagttccttcctcaaacacagtgcttgatgctgtgtaccagtttcccagcaccacccaacatttcggcaaaagcttgtgccccaagctgaatggattgcgggcgcatggaggcgatgaggcgctttgttgagaattcacagacaatttttcggtgaattgtgcccatgttcatcaatgcgcgcgataatgagaccatgccagtcatgaatgatgaagtgcccgatgagggcgattacgatgccgggcgtggccgcggcgaattcgacaacatcacgcccgaagacttcattcacgggggcggttcgggccatggcaatcctccggggtggcttggcccggccgatatcaaccgggcccgccaccaaatgcccatcgcatacgtggagatagtgccggtgcgtaccgatgaaatggggcgcattgcccaggtcggctcgttgctgcgcgtttccgaagacgggtccattgagcgcacgctgatcaccggccgtgtgctgtatcacgagacgttgcgcgaggcgattgcccgtaatgtggccaaggatttgggagatatcgcgctgccgttgctgcccacctcactgcagccgttcaccgtggctgaattcttccccacgccggggctgggcgaatactatgatccgcgccagcatgcgatcgcattgtgttacgtggtgcccattgccggcgactgcaagccgcaggacgagaccctggacgtggaatgggtggacctgaagagcggcatgatggatactttcgtggcgcagatggtcaacgggcatggccacatcgtgcggcaggcgctggcttgggccggaatctgagttttcaacctcccgctggcgggaggtggcgcgtagcgccggagggtggtccggggaggattccgtctgagaccacccccagtcggctttgccgacagccccgccagcggggcatgaatgtgaaggagtaattcatggcaatagaactggccaatcatatatatagggacggcgagggcgtgccggtggtgctgatgaacgcctacccggtggaccaccgcatgtgggacgtctgcgcaaaggcgctcgccgactttgccgatctggaggatgtgccgccgttcccgatttgggcgccggatatggcgggctcgggtgaatccccggttcccagcgaggccgattccgggccgcgtatggccaacggcgcatatagcgaggctttggatcgactggccgatgcctacgttgatctgattaaggccgctggctacgaacaggcgatttgggtgggcctgtccatgggcggctatgtggcgatggatattcaacgccgtcaccccgaagccgtggccggtctggctttgtgtgacaccatggccgcctctgacggtgtgggcggcgaaggccgtctgaccatggcgaacgctgccgagcagaccaattccgcggagccggtcatgcatttcgcacgcccggccgagggcgattccaccgtgaagcgtacgcccgaattcatcgagaccatgaccgcttggatagaggagcagaatcccgccggtctggcgtggcgtcagcgcatgacctatggccgtcccgatatgagcgatgtgccggccaccatcagcgtgcccaccgtggtggtatccggcgagcaggatccatccagcaatccgagtgtgctgaagccgttggccgagaagatcgccgacgcagaattcgtggacattcccgactgcggtcacttcagcgccgtcgaacacccggacaccgtggcccgtgccctgctctcgctcgtcaagcgcgtgcaacaacactgacttcctcccgctggcgggaggtggcgcgtagcgccggagggtggtctggcgaggattccgtctgagaccacccccagtcggcttcgccgacagcccccgccggcgggggcaaaactgcattttggagatacgtatgactgctgacattcacttctcgccgttggcgctgacccgcgcgctgccgttcctgccgcttgcccaaggcgatatcgactatcaggtggatcggcgtagcgagcccgatctgattgacaccttgctcgcggacccggccaccaaagtggtgctgacccgtggcgggctggttgccgtgccgcgcgggcagggcgaccttgtggactatgagagcgtgaaaatgcggctcgccacgctgccgggcgcatacgttggcgaggagttgcgccgttaccctgaagcggtcgccatgttcctcggctcgtacggtggtgtgcgcggcgaatgcgtgattgcagtggacatatcccgcgtgccggaaatcggtgagggtgctgtgcccggcgcacagcccaacggcgtactgggtgttcaggatgccggcactgtcgatggcgcgatgggcttggccaatgccaacggtaacgctgctggcaagcgtgctggcgaatcgggcggagccgccgaatccgctgctccctttggtgtgccggattcagctgggcaaggtgcggatgacgcatttgacgagtcggtcagcaccccggcatcccacgccgcgccgaagcccacactgctgcaacaggccgtaacgcggttcgactgggtggatttgcgtggatttgcgccacacgccaacgcgcgggaggccggtcaggccaccagcgcggtcaccctgagcatctggcatagccgtcagcggttctgccccacatgcggtgcccccgtgttgccgtcgttcgccggatgggcgcagcgttgctccaaccaggctgacggcaatcgtattttgttcccacgcgtcgagccggcggtgattaccgctgttgtggacgggcaggaccgtctgctgctgcaacacaatgcggcgtggaaagacccgaatctgtattcggtgtctgccggattcgtggaagcgggggagaaccttgagcatgcgtgccggcgtgaggcccgcgaagaaaccggcattcagctgggcgaggtgcggtacttgggttcgcagccatggccattccctgcctcgttgatgatggcgttcaaggcacatgcgattaccacggatgtgcatgtggacggttcggaaaccgtgaccgcacgctgggtcacgcgcgacgaatacaccgccgagctgattgccggccgaatggtggcaccagggcgcgccaccatcgcacggtacatgattgaggagtggcttggacgcgagctataggttaggctggtgtgtatgagtgatgaaaccgaacagccgctgaacctcgatattcccgagcatcttgagtactccgacgaacacgtatgggtggatcgttcggacgatcttgccatcatcggcatcaccgaatacgccgccgaccaactgggtgagctcgtgtttgtggatctgcctgagccgggcacccgcgtggaggccggcgacgaaatcgtggagcttgaatcctcgaaggccgtccagccgctgatcagcccggtggccggtaccgtgaaatacgtgaatcgcgacgtggcggacgacccgtccgtggtgaatggcgatccctatggcgaaggttggattctcaaggttgagctcgacgatgatgagcctgagctgctgaccgccgaggaatatgccaagattatacggtagccaagtgttcaggaactcataacctgagtggcctatattggtgcatatgagaagcccacgcgaggattttgaagcggccgcccgacacctgacgccagtacatggcagtagtgcgccatcgcccgatgacatgcctacggtgccgattcccgcgcgcaaggccgccaccactttcgatacgccgtccagccgtgagcggcttgaggtcaagccggcgttcacccgtgtgattcgccgtaccctcaccggcacgttcggcatttggtcgcgtctttccgcactggcggtgcgccatctcggctggtatccacgtgtggaaccctatgtgggctatggcaccagcgactattcgcgattgatttgccgtacggtatacgctcccgaaaacgcgcgacccggcgaggtaagcaggggcattcgcggcatgctgaccgtgcccgccccacgcacccatgtgcaggccagcattgatgacatgccgttgaacaccatacaaattggtgattctgaagtgtatgacaaggtcgatcgcacccgtgacctcagtagcgaatatgcggtctctgattccgcgggatatcttgacctcgtggctgagcatcgccttgaacccggtattcatcgcgtctcgtacagcgtgaagcgccgcaagcccgtttccgccaacctgtacaccattccggccagtgccaaagtcggcatcatttctgatgtggacgacaccatcatgatcacgcaggcgcccgtgctgtggaaggccgcctacaatctgcttttcctcaacccgaagaagaaggcttccgtgccgggcatgagcgtgctgttcacgcgcatcgccgatctgtttcccggtgcgccgttcttctacctttcgacctcgccatggaatgtggaaagttcgattcgtaacttcatcaccgatcacgggtttcctgaaggcccgctgctgttacgcgatcttgacccgcgcccgaagaccttcgtgccttccggcccgcagcacaaactggagttcgccgagcagcttatggctgattttccggacatgaagttcatccttgttggcgacgatgggcagaaggatcccaccacgtatgccaccatcgcccatcgatacccaggacgtgtgctggccatcgcgattcgtcagctcagtcccaaggaatcatccggtttggcttccgtggcgggcctgacttccacgcaaccgatgccggtcaccgacgttccggtgttcaccggcaccaccggatcgaatattttgaagaccatgctgccgtatctgaaagaacacgtggtgtgagtctcgcgtacaatcgcgtggtatgaccgacgagaagacgaacgccgaagtgccgatgccgcctgtagccaagcgcgaaccgaagcgccgtgaattccacggtgatgtatttgaggacgattacgagtggatgcgcaataaggaatccgccgaggtacgcgactatgtggccgcggaaaaccggtactgcgagcatcgcatggcgcatttggccggtttgcgcaacacgctgtttgaggagcttaaatcacacgtggaagagaccgatatgtcggtgcccacgcgcgtgaatgactactggtatttcacccgtacgcagcagggcaagcagtacggcgtgcagtgccgtatacccgtgcgtggcgagaacgattgggagccgccggtggtggacgccaagggcgagcccggatccatgcccggcgagcagattgtgttcgacgtgaaccgcgagtccgaggggcatgatttcttccggctcggtggcatggatgtaagcaaagatggccgatggctgctgtacggcgtcgacgtcaccggtgacgaacgctatgactttcgtattcgagacttggagtccttgacggccgccgatgctgacggggcgttccccgacctcgatatgccgatggctgatgaatctctgtctttccgcgatgcgagcgcggccgaaccggctgaagcgacagccggtgacgaggccacggaacgtcctgcggcggcggaactacccgaacactttgatggtatcggcagcgcatgcttcaccccggacggtaaatgggtgttctgggtggaagtcgatgattcctggcgtccgtttgccgtatggaggcatcaggttggtacgtccgttgacgatgacgtgtgcgtgtatcgtgaagcggacgagcgtttctgggtgggcgtgggcatcagcttcgatgagcgcaacatcgtaattggcaccggttccaaaaccaccaccgaagtgctgatgctgcctgtggtcactcccgaaggcgagtttcaggcgttcattccgcgccagaccgacgtggaatacgatgtgagctttgcctgctttgaaggtgcgggtgagcatggcgaggatgtgccgcttgccgtggtctatcacaacgccgtcaacccgaattttgagattgatgttatcgacatgcgcgaccataagccgccttaccggctgggtgaaggcgtatgcgtggctgccggctcgccctatggctgtgagcatggcgaatcggataagccgatcactgaaacctacttcaatcccgccaatccggcgattctgcaaggtgcgcatggtctgggcattgagggcatcgccctgcaccgccattttgtatcgctgagctaccgttccgacgggcagccgcatgtggcatatatgaccaaagacgctgcatccgctgattttctggctggtcgtccgtggcgtttcgtggagttgttgcctccgccgcttgagggcgattgggacatggtcgcggcggataggcaagacgtgaccggagaccacggcgaaaccttgtggaccgatgatgccgaaaaggctgaatcatctgccagcgcgagcccgggaacaggtaaatccgcgacctccatgaaaggtgacggtatcagcaagcgcagcggcgactggtttggcggtttgttcggctcgaccaccgaccacaccgaatcctccgatggcgccagcgacgaccacctgcccggcgagacccggcgactgtacaccatcggcaccggcggcaatccctcgtatgacgcgccgcgcatgcgctactcctttgccagctacacgcgtcccggcgagttgcgcgaaatcgatcccgccaccgggaaagacgcgctgctcaagcgtgccactgtgctgggtgacttcgacccgcgtaattatatggagcgccgcgtgtggattaccgcgcgcgatggtgagcggattcctgtttcgctggtctggcatcgtgattgcccggcgcaggattcgccgatgttcatcaccggatatggcgcatatgagatttcctccgaccctggcttctcggtggctcggttgagcatgctcgaccgtggcgtgttgtacgcagtgccgcatattcgaggtggcggtgagatgggccgcgcctggtatgagcaggggcggcgactcaacaagaagcattcctttgaggatttcgtggatgccacgcgcgcattgcaggacgctcatttggccgatgccagacgcacggtggccaatggcggttcggccggtggcctgcttatgggtgccatcgccaacatggcacccgagtgctatgccggagttgaggccgatgtgccgtttgtggacgcgctgacttcgattctcgacccggatttgccgctgaccgtcaccgaatgggatgaatggggtgatccgctgcacgaccccaaggtgtatcagtacatgaagtcctacacgccgtatgagaatgtgccggtcgccagagcggaggacggtgatggagaaaccgtcgatgacaaggtctcttctgccggtgccgccaccggcaaggccgtttccgcagcgcagttcccgaagattttcatcaccacctcgatgaacgacacccgcgtgctgtatgtcgagccgctgaaatggctggcccgattgcagtccgcaggcgtggacgcggtggccaagattgaggttgaggccggtcacggtggcatttccggccgttacaagcagtggcaggaggtctcgtacgagaacgcctggtgcatggacgtgatgggtctcgctcattaggtgtcatgtccactagctgagctggttcgggccatcaggtggccatgcgactaggctccttgaactatggcaaagacatataaaattgccgtcatccccggcgacggcattggcaaggaagtcactccgtgggcccagaaagcgcttgaaaaagcagctgaaggtgtagctgacttcgagtatgagaacttcgacttgggtgccgagcgttacctgcgtgacggtgctattctgccggaggacgaagaggaacgtatcaaggcgaacgacgccattctgctcggggccgtgggcgatccgcgcatcaaggctggcattctggagcgcggcctgcttttgaagcttcgcttcgaccttgaccagtacgtgaacctgcgcccgtccaagctttacaagggcgtcacctcgccacttgccaaccctggcgacatcgacttcgtggtggtgcgcgaaggcaccgaaggcctgtactgcggtgcgggtggcgctgttcgtcgtggcactccgcaggaggtggccaccgaggtgtccatcaacaccgcctatggcgtggagcgcgtggtgcgttacgccttcaagctggccatgaagcgcaagaagcacgtcactctggtgcacaagaagaacgtactcgtcaacgccggcgatatgtggcagcgcattgtagacaagatcggtgaggaatatcccgaggtcactcacgattaccagcatatcgacgcagccaccatcttcctggtctctaacccgagccgttttgatgtgatcctcacggacaacctcttcggcgacatcctcactgatgaagccggttccgtggtgggtggcgtgggctactccgcctccggctgcatcaacgcctccgatgaatatccgtccatgttcgagccgattcacggttccgctccggatatcgccggtcagaacaaggccaacccgactgctgcgattctctctgccgccatgctgctcgagcacctcggcttcgatgacgcggccaagaagatccacaccgctgtggaagcggacatcgaggagctcggctccactgtgcgctccaccgaccaagtcggtaaggacattctggcccgtatgtgatgtctctggctcccttcaaggaggggagccaagtactcttatactggtcgcatgcacatgcgacatggggaatgcaaaacgccgggcggcaaactggttgccgtgaatgtggccgtcgacgaggatggcacaatcaaatcctgccatatcagcggtgatttctttatcgaacctgacgtgaccacccccacccgctttgcgggagcccccgccagcgggggcgaggcttcggaagcattgattcatgaccttgagcaggctctggttcgaggcggttcgctgcaatccgtattggatacgcactctgattgccggcttatcggcacagacgcatcagccatcgaaaccgcattcctccgagctataagcagcgagcttacgcccccgccggcgggggctcccgcaaagcgggtgggggtggccggcgcagacaccaccggaacttctgtatccgtcgatacacaatatgggcagaccgacaaaaccgccgaatatcagtcccgctggaacgagctcaagcgtaacctcaccgtcattcgcgaccatccatgcaccccagccgagcagatgaccatcgatgaaacctgggcccgcgaagtcgcagcgggaacacggcctcccaccatccgattctgggaatgggccggtgcggccgtggtcatcggcaaattccagtcagctccggacgaagtgcatctggccgtggccgaacagcttggattcagcgtggtgcggcgctgcaccggtggcggcgcgatgttcatcgagcccggcaacaccatcacctattccctctatgcaccacttgatttcgtgcatggcatcagcatcgaggaatcataccggctgtgcgattggtggctggtcgaggccttgcgtggtcttggtcttgacgtgcgatttgccgggttgaacgacatcgcctcccaatacggcaaaatcgggggagcggcacaacggagattccccggaaccggtaacgccggtgagtcgggcgcggtgcttcaccatgtgacgatggcatacgacatcgatgcggccaagatggcccgtgtactcaatatcagccaggagaaactttcggataaggcagtgcgatccgccgttaaacgagtggacccgatgaagagtcagaccggtctcacccgtgagcagattatcgatgatttactcgcatggttcacccctgctcaatttcgcggtgatgcctcgtagcgagggtcgcggtggctccgtgcgatagatggaacgtcgctgtcgaatcccgcgggtcgcgttacaatatgacggatgaccgatgacggccacacagataaggacggtgcaatgagcttggaaacgccaaatgcttttgctgatgaggagaacatcctgctgcatacggcactgttcaagcaggtctcgcccagcgaagccgaagaactgttgccgtatctgaagcacgccgcatacgacaaaggcgactacattttctctgagggcgataccgatcaccgtatgtatctgttggagcgcggccgggtcaagctggttcgtacttcttccgacgatcgtgtgcagttattgtccatccatgcgcccggtgaagtgctgggagagattccggtattcgatccgaatggtggtccccgcaccgcgtcggctgtggccatgagccatggcacgtgcgtggtctggttggagcacgacaccctgttctcctggctggacgagcatccgcgtgtggccatcgatatgctgcaggtgatggctaatcgtcagcgcgataacaatgagcgcatctccgacctggtgtttatggatgtgccggcgcgtttggccaagaccctgctcaatcttggttcccgcttcggtgagccggtggaacaaggcctgaaagtgccgcatgacctcacccaggaagagctggcccagctggttggatccagccgtgagaccgtgaacaaggcgttgatggacttctcgaatcgtggctggattgcgcgtgatggccgatcgattatcatcttccagccaggcatgctgattcggcgctcgcggcgctaacggcacgtttcttcgcgatttgctgcatatccagttgctattcagcaaacgttatacgagtgcggttcttgtgatgattgaccattttgcggggccgaacactcggttggtagggcgggccatttagaatggggcccatgcccaaaaagaagtcccttacagttcgtcgtgtgctcgttctgctcttggcctacatcatgcttgccgtatgcggtggtgtggcgaccagcgtgctgcttatcccaggcgtcatcggcgccaataacgtagccaaggcagtgattccgtcactgaaggtcgagaacgtggacttcgatgtgactagtctcccgcagaagtcgacgatgtatgcgagcgatggcaccaccgtcattacggatttttacagccagaaccgtatcgtcgtgccgctgaagaagatttccaaggtcatgcagcaggccgtggtggcgcgtgaggatcgccgtttctggacccacgccggcgtggacgtgcagggcgtgatgcgagcgttcgtcaacacctatctgttgaagggcgatcagcagggcggttcgtcgctgacccagcagtatgtcaaaaacgtgctgcttatgcaggccattgaagacaacgattcgattgcccaataccatgccacggaagacactgtggcacgtaagattcgtgagatgctgatctcggtgcagatggagaagaagtacaccaaggccgagattctgcagggatatctcaacatcgcccagtttggtagcaacctgtatggtgttgagaccgcggcccagcggtacttcagcgtgtccgccgccgaccttaatgcagtgcaggcggctacgatcgcggccatcaccaagaacccgaacaagtatgacccgctgattgaggcgaatcaggaggagagccagaagcagcgcaatcttgtgctggatctgatggcacaggaagggtacatcagcgagaaggaatgcacggaggccaagaacactccgcttaaggacacgctgaaagtacaggacgtcaatgtcggttgccaggataccggcgattacgccttcttctgtgattatgtggtgcaccgtatccagaactccgaggagttcggcaaaaccgctgccgagcgtagcaagttgctgcaggaaggcggtctgaagatcgttaccacgctggatgttgacgccaaccgcatgcttatggacaccgcgcgtaacactattccgccggacgatcccagcggtatggaaatcgcaatcgccgcagtgaaaccgggcactggcgaggtgctgggctttggtctcaaccgccactatgacgccacgcctgaggccgcgaacgacgctaccaaaacgagtcagaactatgcggtcgatgccatcgatggcggtggcagcggctggacgattggttcgtcctggaagcccatcaatctggtcgcatggatggaagcgggtcattccatcaacgacaacttgcagaccaccactgcgtactccacttctgatttcagctgcggcagctacaccggcggtagcgaactttggaaggtgcagaacgcgttcggcacgaccgtgaacccggaaagtccgttcctcggtctggttcgctcgcacaacaccacgcaggcttccatgggcacaatcatgaagctgtgcaaggtggctgacaccgccacggagctcggctaccatgacgctagaaccggtgagaccattgaaaagacctcttcgtacacgccgtccatgatggtcggttcagtgaatgtttcgccgttgaccatggccagcatcttcgccgtgtatgccgcaaacggtgtgcaatgcaacccgatcgctatcaccaaggtcaccgacggtgacggcaacgacctgaaggtgccttccgccaactgccatcaggcggtcgatccggaaattattcagacacttgcctacacgttgaaccagggtgtgaccagggccgacggtcagggccataacttccagctcaacaacgggcgtaagtccttcggtaagaccggtacgagcgaagacctcgccgtatccagcggatcgttcattcccaaccagattgccgcttttgcgtcggtgggtgatgcacaggctccgtattcccatcgtattgccaacatccgcatcaatggtgtgtacaacagctactgggatggttcaacgattgcagcaccggcattgcgcaacttcctcaatgcctacgcggatgcgaagcaattgccgattgataacgactacggtcaaggtgttgcgaagtacatgaccagcggcactacgttcggtattgccggacgttcgtatagtacgagacggtcaaccacgacgaataacgataacaataacaataacaatgattcgtccacgaacaatgagtcgaacaactcacagaacgatcagtaacacatgacgtattacctacatatgtgattgctggttacgtagttgacgggcgcgggccttttcgggcctgcgcccgtcttacaataatgacggatattgtgccgactgcaccaccggtatcgaccggcatcggaaaggggagcgatgagcgacgatgagacgacgcacggcaattttgatttccgagggttcgatgtgcccgaactggaggcagtgacgcttgccgcagcggcggacggcggcaaatctgcaggctctgggaaatcgggtaagtccggtaaatcaggcaaatccagcaaacataagtcagaccaagacaagaaaggcacaacggtggctaaagaagagaagaagaccaagaagaaccgtccggggctgttcaccccgatggagctgcgtggccttaccgtgcgtaaccgcatctggctgccgccgatgtgcacgtattccgcctatgcgcgtgatggcaaacccacgccgttccactaccagcattatgtgtctcgtgcctttggtggctttgggctgattattgccgaggcgactgcagtggcaccggaaggccgtatctcgccgtgtgatctgggtctgtgggaagacggccagattgacgcttggcgctggattgtagatggtattcgtgaggccggagcggtgccagccgtgcagctcaaccacgctggacgtaaggcttccaccggatgctttgcagtgggatatgagaatcagagcgtgcctgttgaagcgggtggatggcctacggtggcaccgtccgaaatcgcttttggtgggttggatatgccgcgtgcactgtccgtggatgagattcatggtatcgtcagggccttcgccgctgcggctggccgtgcggtcgccgccgggttccaggcaattgagattcatgccgctcacgggtatttgatttcccagttccttgatccgctgagcaacgagcgtgacgacgaatacggcggtgatctgaacggtcgggcacgttttctgctggagatcgtggacgcggtgcgcggagttgttcccgatactttgccggtgttggtgcgtatctccgcgactgattgggccgcgggcggctgggacctggatcagacgattctggtatccaagatgctcaaagagcatggcgtggatctggtggatgtgtccaccggcggcatcgtggctggcgtttcgattccggtcaagccgaactaccaggtgccgtttgccgagcaggtgcgtgccaaggccgacgtgccggtgacggcggtgggtcttatcaccaagccaaagcaggcggagaagattctgattcacggcgaagctgatgcggtggagattggccgtgctgcgctgcgcgacccgaattggccattgcgtgccgcccacaagcttggcgtgccggttgccgaggcgccttacgcaccgcaatacgtgcgtggcgcgtactgagtgttgtgtacataggctcccgctggcgggagccggccggcaaagccggactgagggtggttaacgtacatacgtcgaccaccctcagcctcactgtgttcggcagctcccgccagcgggagccgggatatctagattcgcaaactactccacgtccacgccgacggcgtcggaaacatgctcgaatccatcacggcgcagcaggttggctaggccgcgcttcaatacggtgatttgctgcgggccacggtacatcagcgagctgatgaacatgaccaggcttgaaccggaacgaatcttctcataggcctgctcgggggtgaagacgcctccgatgccggcgatggcgaaccggtcgccatagtccttgtacactttgcgaatcagctcattgctggcctgcgtgcacgggccgccggacagaccgccttcccagtcgcgcggaatctcaagcccggtgcggtccttctgcagattggcgatggacaagccttgcacattgtgctcggccagcacatcgagcagttccttgtactcaccccacggcttattcaacggcatcttgaccagcgttggctgcgggcgatcgatcttgtcgagtgcggtgaacagtcggtcaagtgcctccgatgtggaggtgaacggttcacccacgtgtgtgttcggacaggagacattgacctccaccattgcggtacggccggcggcacggcgcatggagatgcagtaatcctcgataccttcgtccaaatcgccgcactggtcgtcgttggtgcgggcgattgagacggacacctgcatttggtttgcctgggtccatgccttctcggcgcgctcgatgaccttgtccgagccgatgttggcgagtcccacatgcaccatcatcgaatcgtattcgggcagacgatggaaccagggcttggcgttgcccgggcatgggcgggaggtggtggagccgaccgtctcaaagccgaaaccggcgttgtcaagcagcacgggcatctcgcagttcttgtcgaggccggcggacaggccgaacggattggtgaagtcgattcccatcacattcgtctccagaatgggatcggtgtagttgagcatcatgcgctcggcaaacagcagtggcggcatgtgtttgaccacggagcaaaattcgatcatctgatcatgcgcttcatcggggcgatggttgaacacgaagttcggcttgatgatgtgcttatagccaaaagtgaacaggtcagtggtggctttgttgacggcgtcgtgccaaaagctttcagaaacgtaagtcatattgcccattgtctcacgtttcagcagattgtgaccagcatggtgttcctattctttaagttcgtctttcttggctcccctctctgaggggagctgtcgcgcagcgactgaggggagattcgtggggtgctgcacggtggctgaaggaagttcggaacattacatgttgacagtcctgaaaaatgtgcgtttttgcgcggttctgcaggagtataggtttgaatcgcccggaattttcgggaaattgtccccaaaacgctcaagccggtttggtttgtgagcttttgtgtgcgataatgttcgcatgatttcgtcacaacgtcagcatctcatcttgagcaggctgcgcacgcgcggtgctgtgcgtattactgcgctatcgaaggagctgggtgtgtcagcgatgaccatccgccgcgatatcgccgaacttgccgacaagggtttgttgaagcgcgtccatggcggcgcggtgaccactagtaccttgctgagcgagcctctgttctccgtcaagtcccagatggacatcggtctgaaagatgccattgcccaggaagctatcaaatacgtggctcctggcgacgtgatcgccatcggcggcggcaccacggcctatgtctttgcccagcatctgctcgaatcgcagcagtccagcggcatcaccattctcaccaattcgattccagtggccgagttggtgcaggccctcgaatccaaggatgtggaagtgattgtcaccggcggtgtaatcacccgctcaaactcgcttgtcgggccgattgcggacaaggtcgtcgcctcgctgcgcgtcaacactgtattcctcggcactcattcagtgtcgattccccgcggcttcctcatgccgaactcgcttgaggccgctaccgatatggcgatgatggacatcgccgatcgcaccatagttttgaccgatcacaccaagtggagctgcacgtcgctgtcgctgttcgcgcgcttcgaccaggtggacacggtcatcaccgacgacggtctcgaccctgactccgccgccaaaaccaaggatttggtaaaggaactcgtgctggcccaccagagcgagaccattgaggaaagtgagtaacacccatggctgatttcgccaactacacccccggagagtacgcgaagaagcatatccgcatcacgccgacgacgcttgccgacggtcgtgacttcttctatctggacgacgatcccgagttcgtctccggtgccaagacccgcgagctcaaggatccgcgcccgctggactaccgttttgccccgcacctggacgccgacggcaacgaagtgccgtacgccgctccgcagatgcgccgcgacccgctgaccggtgactggattccgatggccaccgcgcgtatgaaccgcccgatcaccgctggccccggcgccaccgccaagggcaacccgctggccgcccgcaagcccggcgacccgtatcaggacggcgaggtgccggacaccgattacaacgtcgtggtgttcgagaaccgcttcccctccatggtgcgcgtgcctggcgtttccgaggacgtgacctacgttgacggcaacccgctgtgggaaaagaagctggccgccggccgctgcgaagtcatctgcttcgatccgaacgagaacggcctgccggctgacctgccggtgtcccgcctgcgtaccgtggtcgaggcatgggccttccgtaccgctgaaatctccaagatggagggcatcgagcagatcttcccgttcgagaaccacggtcaggagatcggcgtctcccttgcccacccgcatggtcaggtctactgctacccgttcatcgccccgaagatggagaaggaactccagcacaccgaggcctaccacgagaagaccggtggcaacctgcttaaggacatcatgaatgccgagctcgaggctggcgagcgcattgtgatgcgtaaccactcttgggttgcttacgtgccggccgccgcccgctggcctcttgagatccacgtggctccggttcgcgacgtgctcaccttggacgagctcaacgacgaagagcgttgggaccttgcctccatgtactcgcacctcctgaagcgcggcaacgcgttcttcgacaagggcgacggcaagggcatggacctgccgtacatcgccgcatggcaccaggccccgattcacgacgctcgccgtgagaactaccgcctgaacctgcagttcttctccttccgtcgtgctgccaataagatcaagtacctcgccggctccgaatccggcatggccgcctggatctccgacaccacgccggaactcatcgccaagcgcttccacgagctcggctccatcgatatcgccgactgatagaaagaaaaacaccaatgtctgctgttgaattcattgagccgctgacccatgaagagggcgtctcgcaagccaccaagctgtttgtggacacctacggcgctgcgcccgagggcgtgtgggctgctccgggccgtgtgaacctgatcggtgagcacaccgattacaacgccggcctgtgcctgccgatcgctctgccgcaccgcactttcatcgccctgaagccgcgcgaagacaccaaggttcgcgtcgtctccggcgtggctcccgacaaggtcgctgaagctgatctcgatggcctcaaggcccgtggcgtggacggctggtccgcctacccgaccggtgtggcttgggcgctgcgtcaggctggtttcgacaaggtcaagggctttgatgccgcctttgtctcctgcgtgccgctgggctccggcctgagctcctccgccgccatgacctgctccaccgctctggctttggacgacgtgtacggccttggctacggcgattccgacgccggccgtgtgaccctcatcaacgccgccatcaagtccgagaacgagatggccggcgcctccaccggcggtcttgaccagaacgcttccatgcgttgcaccgaaggccacgcgctgctgcttgactgccgtccggagctgaccccgctggagaacgtctcccagcaggagttcgacctcgacaagtacaacctcgagctgcttgtggtcgatacccaggctccgcaccagctcaacgatggccagtacgctcagcgtcgcgccacctgcgaggaagccgccaagattctcggtgtggccaacctgcgcgttaccgccgacggcatctccaaggccgatgaccagttccaggccctcaaggaaacgcttgacgccctgcctgacgagaccatgaagaagcgcgtgcgccacgtcgtcaccgaaatcgagcgcgtgcgttccttcgtgcgtgccttcgctcagggcgacatcaaggctgcgggccgtctgttcaacgcttcccacgattcgctggccgccgactacgaggtcaccgtccccgagctggacatcgccgtagacgtggcccgcaagaacggcgcctacggtgcgcgtatgaccggcggcggcttcggcggctccatcatcgctctggttgataagggccgttctcaggaagtcgcccagaagattgccgacgagttcgaaaagcagggcttccacgctccgcgcgcccttgcggcttatgccgctccgagcgccagccgcgaggcctgagctacttactttggctcacgctggcgggagctgtcgaacgtagtgagactgagggtggtttgtcgtatacagtgaccaccctcagtcagcttcgctgacagctcccgccagcgggagcccccctcctcttctctttttccctccctatcgtgccgcgacacgcggggcgtacttacgaagaatttcgaatcgtattacggttgcggattgttttgaaaaacgcatggcttctgccgaaatcacatggcaggccatgcgttttttgttgccgtcgttggcccggacgttaggggcatatcgacatttcgcgcgacggcaatgatgaagagacaatccgagagaggttccgttgtccgctacccagacaacccctgaaaatactacgtccgccggtgtatccggccacactatgaatacgagcgatgcccgcgaatccttcgatgagggcagcaacagcaatatgtcggctactcagcggcccagccgaggtgagtccggcgtcgcggtggtgcggttgagagtctggccgtgtgaacatggcccaacggacccgatgattcctgagagtccgcgaatccggaaatggaacggcatgaatggcgtgatgcaggtttgtgacttgtctgagctgttccattccggcggtattggtgcctggcaacggtcagacgacagacgatacatgaatcggtaatgaacataaatggcgggtgtcttccctatacttggggagtcacccgcttttcgtatacgaccagggagagccatgaataaggccatcatcaccgtcgtcggtcaggataccgtcggcatcatcgcgcgcgtctgcacctatctgtccgagcacaacgtcaacgtgcttgatatttcgcagaccatcatcgacggatatttcaacatgatgatgattgtcgactatgccaatgcggacaaggactttggcgccatggtcggcaaccttgaggatcttggcgacgacatcggcgtgcgtatccgctgccagcgtgaagagatcttcaccaagatgcaccgtatctgattctgatatagctttcgattccctcccgctggcgggaggtggcgcatagcgccggtgggtggtctcatgttggataccaccccagtcggtttcaccggcagcccccgccagcgagggcgaaaaaacaaccgtaaggaacacaccatgctgaatatcatggaggtccacgagaccaatcagatgatcgagcaggagaagctcgacgtccgcaccatcaccatgggcatctcgttgctcgactgtgcgacggacaacgtcgacacgacttgcaacaacatttaccgcaagatcaccacctacgccaaggatctcgtctccactggtcaggccattgagcgtgactacggcatcccgatcgtcaataagcgcatcaccgtcaccccgatttcactggtgggtgccagctcctgcaagacgagcgaggatttcgtcaagatcgcgcatgcgctggataaggcggccaaggaagtcggcgtcgacctgatcggcggctactccgcgctcgtttccaaggccatgaccccggctgaggaactgctgattaagtccctgccgcaggcgctttccgagaccgacatcgtgtgctcgtctgtgaacgtcggttccaccaagaccggcatcgacatgaacgcggtcgaactgctcggccacatcatcaaggacatctccgagcgcaccgccgacaacgactcttacggctgcgtcaagttcgtggcgttctgcaacgtgcctgacgacaacccgttcatggccggtggcttccacggcgttaccgaaggcgacgcggtcatcaacgttggtgtctccggccccggtgtggtctcccgcgcactcgatgcggccaaaggcaaggacttcgagttcctgtgcgagaccatcaagcgcaccgcgttcaagatcacgcgcgtgggccagcttgtggctcaggaggcttcccgccgtcttggcgtgccgttcggcatcatcgacctttccctcgctccgaccccggccgtgggcgactcggtgggcgaagtgcttgagaagataggcctcgaacaggttggcgctcccggcaccactgcggccttggccatgctcaacgaccaggtcaagaagggcggcatcatggcgtcctcctacgtgggcggtctgtccggtgcgttcatcccggtctccgaagacaagaacatgattgacgctgccgcctccggttgcctgaccctcgagaagcttgaggccatgacctgcgtatgctcggtgggtcttgacatgatcgccattccgggcgatacctctgcttccaccatctccggcctgatcgccgacgaagccgccatcggcatggtcaaccagaagaccactgccgtgcgtgtgatccctgtggcgggcaagggcgttggtgaaatggcgaacttcggcggcctgatgggctacgcgcccatcatgccggtcaaccagaccagctgcgaggccttcgtgactcgtggcggtcgtattcccgctccgattcacagcttcaagaactgattcagtagggcatctgccttcaaaggaggtacctctggctcttcgcggagagctatctgctttcagagaggtacctatatacggaaacctcgagtatgcgcgttggaatatcaacgtccatactcgaggtttcttaattgaggtgcccctttgaaagcagaaagcattctgcaaaagcccgaatgcaccccctccgaaggcggatatcgatttggatgacctttcgagaggtctattcccgtttcgaggggctgatttcgacctttctggaggtctacttccgtttcaaggggctgatatatgcgaagaccccgagtacaagcgttgatatttcaatgtctgtactcggggtttcgtcctttgacagccccttgaaacggagatagacctccggcggatgccgaatcagcccctcaaagcgccgatagacccatcttctgcgttcatttccacaatgatggtcgtgctgcgaggctcagggtttcctccctcacgcctgtcggcgttcgttcggcgtcgctactcgaaggcccaccgggccttctcctcacgctccgtcctgcaattgtggtctcgctgcgcgaggcttgatgtttcctctctcacgcctgtcggcgttcgttcggcgtcgctactcgaaggcccaccgggccttctcctcacgctccgcccttgaaattcagttggcgccaggcttcgtagatggcgatggatgcgcagttggtgaggtttagggagcgcaaggacgggcgcatgggcagtcgcacctgttcggccacatgcgggccctccatgatgtccatcgggtcggggatgtcgccgggctcggggccgaacagcaggatgtcggtcggcttgtattccacttcggtgtacagcttggtggcatgtgcggtgaacgcgatgatgcgcgaattgggcatggactccaccaggttgtcgaaattcggatgcagcaccacgtgggccatgtcgtggtagtcgaggcctgctcggcgcagcttggtgtcgcgcaggttgaaacccaacggctccaccaaatgcaggatggtgccggtcaccgcgcacaggcggatggccgagccagtgttgccgggaatacgcggtgagtagtagcacaggtgcggtgttacggtttcggtggtggcggccttttcagccgagagcatcgcgtccaccacggagatggggttgccatgcgcgtcggttacgagttcgtccggtccgtaattcgatttacggtacccgtactcgaacatcttctcgacttttgtttcgggattctgcgcgttctgcgaattctgttctgcctcgttcgtcatagctgctaagaataagaacgatgaacgacacagcaatttctttacggctcggcgcatggtgggaggccaatgcgcgtgacttgccatggcgcttcggacgggccacgccgtggggcgtgctggtcagtgaggtgatgagccagcagacgcagatgagtcgtgtggtgccgtattggaacgattggatggcgcgctggcctgacgcccgtgctcttgccgcagcacctaaagccgatgtgatcaccgcatggggccggcttggctatcctcgccgtgcgctgcgattgcaggaatgtgcccgcatggtggcggaagaatatggcgatgagctgcctcgcacctacgacgagctcgtcgctctgcccggtatcggcgactacaccgcctccgccgtgctgagctttgcattcggtgagcgcattgcggtgatcgatacgaatattcgccgcgttctgagccgcgtattcctcggcaccgaatctcgcgggggagcggcgagcccggccgaacgcgcgctcgccaaccgcatgttgccccaagacagggtttgtggggacggtgccgattgcacggaccatgcataccgatccggcgaacacactttcctgcagcgcagcgaacctccatcggtcacgtggaatcagtcggtgatggaattgggcgcggtggtttgcacagccaagacgccgttatgcgagatttgcccgattgcggatgattgtgcatttctcaaagccggccgccccggactgggggagcgccgcacccgcccgcggcagcgattccaaggcactgatcgtcaggtgcgcggactggtgcttgcggcgttgcgcgcattgccggcgaatgacacgcttgccagagtggatgccgaaaacctatggaaagaccagattcagctcgactcctgcatcgcgagccttgacgatgacgggttgatcgagattctggagaatggtgcccttcgtctgccccacgactgattccgcacagtgctatgaagtggttgaaccgcacacgtgtgagagcgtacgcgtggatgagcggatgatatcgctgagcggaatattggtcttggctgacattctgtgaaaatatgggactgccgtgcgtgcatggcgatgacgaccgtacactgaagaggttatggcagtgcagaggaataagtcaggtgcgaatcctaaaagcgccggagatggtcgtggcgggtggggccgcccgatgtctcgcggcaaaaacacctctcgcaagtctgcttctcggaagttctccaatcccgttcgctccggtaggactgtcaaaaccgcgatacctgcaaagaccatccggtctgccaaggcaggtgctgccacaaagcgcaccatcagtaagaagaagcagacgatgtaccgtcgccgccgcatcgtggttggtgtggcattggtgttagttctcgcgttaatcgtattttgcgtctacagccttggccgtggtgtcggagccatcaacacggcaattcatcatgacgaggtgtatgccatttcccgcgacaccgtgccgacgccgaagaaaaccagcggcgttaaggattgctcggccaaggatttgtcgcttgatctgagctcggcgtcccaatccgtgccggttggcgggtcattggaattcaccgccaagatcgtgcatgacggttccgacagctgtctggtcgatggatccgatgcgggccgcgtgctcaccattacttccggtcagcaaaccgtctatacctccgccttgtgcgccacggattcccgcatgctgttgatggccaagggagacaaagacattcagcagctcaaatggaatgccgattccaatgccgcgctgaccgagtgcacggatgaggcggactggcctcgcgtgaacgcgggaacgtatgtggctcagctgagtctgaaggatcatcccaaggtgaagagcgatccagtgacgtttacggtggagtaattggaggggggctgctccgggcttctctccaccctcgcccgtgtgaggtcggcctcggcatcagcgggaagtcgcgcaaaagatgtcctgctatagcgttattcttttgacttcgcatgaggtgtgtcatattgcgggcatgccatcgacaatgaagcgtccgcataggcatatggtggccatgccggcgctcccaggggaattattaatctaagcgagcgataaggaacgtccattggctactgagtctacgacgaacaccaccaccatcatcgcacgcgccgaccagcatgatattgacctgcacaaggcgtcggatcgcgtgaacttcggttccatcaaggaacccatcgatgtgccctacctgctgggcgtgcagaccgacagcttcgattggctgatcggcaacgaacgctggaaggcgcgcgtcgaggaggacgaaaagaacggcactaacaccgtggcccacacctccggcctcgatgaggtcttcaacgagatctctccgatcgagaacttcgctcagaccatgagcctgaccttctccgatccgtacttcgaagagccgcgtcacaccgtgcaggaatgcaaggagaaggattacacctactccgcaccgctgtacgtgaacgccgagttcgagaacggcgacaccggcgagatcaagtcccagaccgtgttcatgggcgacttcccgctgcagaccccgcacggcacctttatcatcggcggcaccgagcgagtcatcgtctcccagcttgtgcgctccccgggcgtctacttcgatcgtcagcaggaccgtacttccgacaaggaagtcttcggcgcgaagattatcccgtcccgcggcgcatggcttgagttcgaggtcgataagaaggaccagccgcaggtgcgcgtggaccgcaagcgcaagcagtccgccatcgtgttcctcatggccatcggcatgaccaagtccgagatcgccaaggccttcaaggactacccgctggtgctcgatgcactcgagaaggaaaccctcgagacccaggacgaggcccttgttgacctctaccgcaagattcgtccggctgacaccccgacccccgaggccggcaagaacctgctggactccttctacttcaacaccaagcgttacgatctggcccgcgtcggccgttacaagatcaaccgcaagctgggcgttgaggccgacttcaacgaccgttccctccaccaggaggacatcatcgccaccatcaagtacttggtggccctgcacgatggtgctgcgaccttcccgggcaagcgcaacggcgaagatgttgacctgcgcgtggacgttgacgatatcgaccacttcggcaaccgtcgtatccgtcaggtcggtgagctggtccagaaccagctgcgtaccggtctgtcccgtatggagcgcgtggtacgcgagcgtatgaccactcaggacgccgaggccatcaccccgcagtccctgatcaacatccgcccggtgaacgccaccatcaaggagttcttcggcacctcccagctctcccagttcatggaccagaacaacccgctgtccggtgtgacgaacaagcgtcgtctctccgctttgggccctggcggtctgtcccgcgatcgcgcctccatggaggtccgcgacgtgcacccgtcccactttggccgtatgtgcccgatcgagtctcctgaaggcccgaacatcggtctgattggttctctggcaaccttcggccgcgtcaacccgttcggcttcatcgagaccccgtaccgcaaggtcgtcaacggccacgtgaccgacgaggtcgagtacatgaccgctgaccgtgatctcgaccacgtcatcgcccaggccaaccaggaacttgacgagaacggcaacttcgtctccaagtccgcccttgcccgagtcggcgaggaagaggcagtcgatgtgccggtgagctccgtggattacatggatgtctccccgcgtcagatggtctccctcggtgcctccctgattccgttcctggagcatgatgagggccaccgtgcactgatgggtaccaacatgcagcgtcaggccgtgccgctgatcgaatccgagcgcccgctggtgggtaccggttccgaatggcgcgccgccaacgattccggcgacgtcatcaaggccgacaaagacggtgtggtcacctacgtgtccgccgacctgatccgtgtgatgaacgacgacggcaccaccagctcctacaagctggctaagttccagcgttccaaccagaccacctgctacaatcagcgcccgatcatccacgatggcgagcgtgtggaggccggctcggtgctggccgatggtcctgccatccagaagggcgacctggccctaggcaagaacctgctcatcgccttcatgccgtggaacggctacaactacgaggatgctgtgatcatctcccagcgcctcgtgcaggacgacactctctcctccatccacatcgaggagtacgagattgacgcccgcgaaaccaagctgggcgccgaagagattacccgcgacctgccgaacgtcggcgaggacgctgtggccaaccttgatgagcgcggcatcatccgcatcggcgccgaggtcgaggccggcgacattctggtcggtaaggtcaccccgaagggtgagaccgagctgaccccggaggagcgcctgctgcgcgccatcttcggcgagaagtcccgcgaggtgcgtgacacctccctgcgtgtgccccacggcgagaccggtacggtcatcggcgtcaaggagattacccgcgaggatgccgaggaggacggcgacgagctgcccaacggcgtcaaccagatgatccgcgtctacatcgcccagcaccgtaagatcacggtgggcgacaagctctccggccgccatggcaacaagggctgcatctcccgcatcctgccggaagaggatatgccgttccttgccgacggtactccggtcgacatcatgttgaacccgctgggtgtgccttcccgaatgaacctcggtcaggtgcttgagctgcacctcggctggattgctcactccggttgggacatctctttggatccgaatctggaagccgagtggaagaagctgattccgtccggtgccgagaaggccgagccgaacaccccggtcgccaccccggtgttcgacggtgtcaagccggaagtcctgaggggtctgctgtccaccacgctgccgaaccgtgacggcgaccgtctcgtgggccccgacggcaaggcgactctgttcgacggccgcaccggtgagccgtacaccaagcagatttccgtgggctacatgtacatgctgaagctgcaccacctggtcgacgacaagattcacgcccgctccaccggcccgtactccatgatcacccagcagccgctcggtggtaaggcccagttcggtggccagcgcttcggcgagatggaggtgtgggccctcgaggcctacggtgccgcctacacgctgcacgaaatgatgaccaccaaatccgatgacgtcgacggccgcgtgcgcgtctacggcgccatcgtcaagggcgataacctgccgccggcaggcatccctgagtcgttcaaggtgctcctgaaggaaatgcagtccctgtccctgaacgtcgaggtgctcaacgccgaaggcgtggccatcgacatgaaggacgaggaagacgatccggtgagttccgccgacgatctcggcttcaacattggtgcccgccccgacgcggccgccaaggaagaccagaaggccgaagaacccgaataccagtgattccacgggttgtcgcctgccgcgcctagagcggcgggcgacaactccacacagcgtgaacgaaaacttttaacagaaacggattaacaagtgctggacgtcaacgcatttgacaagcttcgtatcggcctggccaccgccgacgatatccgcggctggagccacggcgaggtcaagaagcctgaaaccatcaactaccgtactctgaagccggagaaggatggtctgttcggtgagcagatcttcggtcctacccgcgattgggagtgcgcctgcggtaagtacaagcgcgtgcgcttcaagggcatcgtctgcgagcgatgcggcgttgaagtgacccgtagccgcgtgcgccgtgagcgcatgggccacatcgagctcgccgctccggtgactcacatttggttcttcaagggtgtgccctctcgcctgggctacctgctgaacgtcaccccgaaggatctggagcgcgtcatctacttcgcctcctacatggtcaccgaggtgaacgaggacgagcgccacaacgatctgcccggtctgcaggacgagttcgatgccgagatcaagcgtcttgagcagcgtcgtgacaccgagatcgaggctcgagccaagaaggttgaggaggacctcgccgctctcgaggagaccggcgaagccaagggcccggctcgtgccaagctgcgcaatggtgccgagcgcgagatgactgccatccgcacccgctataacgatcagatcgcccgcgtggatgccgtcttcgacaagttcaagaagctcaagcccggcgacatggtcgacgatgtggatctgtggcgtgagatgcaggaccgctatggcgattacttcgacggctgcatgggcgccgaagctatcaagaagcgtctgcagtccctcgacctcgaagccatttccaaggaactgcgcgaagagatcaaggacgcttccgagcagcgcaagaccaaggcgctgaagcgcctcaaggtcgtcaacgccttcctgaccaccggcaacaagccggaagccatggtgctcgacgtgattccggtcatcccgccggacctgcgcccgatggtgcagctcgacggtggccgcttcgccacctccgatctcaacgacctctaccgtcgtgtgatcaaccgtaacaaccgtctgaagcgcctcatcgagctcggtgctcctgagatcatgctcaacaacgagaagcgcatgcttcaggaagccgtcgactccctgttcgacaacggccgtcgtggtcgcccggtcaccggtgcctccaaccgtccgctcaagtccctgtccgacatgctcaagggcaagcagggccgcttccgtcagaacctgctcggtaagcgagtcgactactccggtcgttccgtgatcgtggttggtccgtccctgcgtatgcaccagtgcggtctgccgaagccgatggctctcgagctgttcaagccgtttgtgatcaagcgtctggttgacctcaactacgcacagaacatgaagtccgccaagcgtcttgtggaccgtggcgactccgaggtgtggggcgtgctcgaggaggtcatctccgagcacccggtgctgctcaaccgtgcacctacgctgcaccgtctgggtatccaggccttcgagccgattctggtggagggcaaggccatccacctgccgcctctggcctgcgccgccttcaacgccgacttcgatggtgatcagatggcagtccacctgccgctgagcgccgaagcccaggctgaggcccgctcgctgatgatggcttccgacaacatcctgaagccggccgatggccacaccgtgaccatgccttctcaggacatgatcctcggtctgtactacctgtccaccgtgctggaaggcgccaagggccagggccgcgtgttctcctcgctggaagaggccgaaatggccctcgaccgccacgagatcgacatgcaggccaaggtgctcatccgcctgcctgagaccttcgtgctgccgaagaactgggagcccggcgaggtcaaggtgctcgccccgcgcgacggcgagaccgacaccgccaaggaagagcgcttccacgacggcaccgtgctgttcgccacctcttacggccgtatcctgttcaacgagaccctgccgaccgactacccgttcgttaacgatcaggtggccaagggccgcctgtccaagatcgtcgatgacatcgccatgcgttactccacccagcaggtggccgccacgctggatgccctcaaggatctcggcttcacccgcgccccttggtccggtgtgtccttcgccttctccgacgtgaacgagccgccggagcgcgacgagaagatcgccgagtacgaggccaaggccgacaaggtcaacgccaactacgagatgggtctgttgaccgaggaagcccgccgtcaggagctcattgacctgtggaccgagtgcacctccgaggtgtccaaggaagtcgaggacaagttcgacccgacctccaacctggccatcatcgtgcagtctggtgcacgaggcaacatgatgcagatcaaccagattgctggtatgcgaggcctcgtggctaacccgaagggtgagattattcctcgtcctgtgaagtccaactaccgtgacggcttgtccgtgctggagtacttcatctcccagcacggtgcacgtaagggtctggctgataccgcactgcgtaccgcagagtctggttatctgacccgtcgtctggtcgacgtctcccaggacgtcatcgtgcgcgaagaggactgtggcaccaaggccggtctgccgattcgcgtggccgaccgtgacgccgatggcaacctggtgctcgttaaggccgccgatggtggtccgtactcccgtctgctcgctgccgatgtcattgacccggctgacggcaagaccgtgctgtacaagcgtgacgatgccctgtccatggacgtgctcaacgatctcgtggcccatggcgtagaggaagtcaagtgccgttccgtgctgacctgcgagtccaagcgcggtgtgtgctccaagtgctatggctggtcgctggccaccaacaagctggtcgacgttggcgagaccgttggtatcgtcgccgcccagtccatcggtgagcctggtacccagctgacgctgcgttccttccactccggtggtgtggctgcggcttccgatatcactcagggtcttccccgtgttaccgagcttttcgaggcccgtaccccgaagggtgaggccccgattaccgagttcgccggcaccatcaagattgtggagaacgatcgcggtcgccaaatcatcctgagcccggatgctgattccggcgctccgaccgaggacggcgccatcaagccgattacctaccaggtctccaagcgtgtgccgctcaaggttgccgatggcgaccacatcaaggttggcacccagctggtcgagggttctgtggatccgaagaagatcctcaccattctcggcaagcgtgctgctcaggtgaacatcgtggaggaagtacacaccgtgtaccgctcccagggtgtggatatccacgacaagcacatcgaggtcatcgtgcaccagatgacccgccgcgtgaccatcatcgactccggcgacaccgatctgctgccgggtgagctggtggacaacgcccgcttccgcgagatcaaccgcaataccgtgaagaacggtggcaagccggctgttggccgtccggcgctgatgggtatcaccaaggcgtctctggccaccgattcctggctgtccgccgcctccttccaggagaccacccgcgtgctcaccgaagccgcgctctccgagaaggtcgatgacctcaagggcctcaaggagaacgtcatcattggtaagctcatcccggccggtacgggtcttgcccgttaccgcaacgctgtggttgagcctgacaaggccatccgcgacaccatctacccgaacttcggtctgggtggcgatggtgatcttggcgacacgaccttctctgacgccgacctgtctgacctgaacttctcgaacctcgagttcggcgatctgaagctcggcgatgacttcaacccggatgatttctattccgatcagggtggtcagggcgacatcgaggagtaatcacttcccgatggctgtgatccagccgcgtatgaatatgagttcatgcgcatgattgacaggcgatggcccggaactggtatggttccgggccatcgcctatttgcggcttggatctgcgggcctcgtgttctggggctggtactgatgccggttgtcgcggtttgcccgacttgggcgagatgtggaacttgtgcggtgtatgcggcctgctgacccggttttaagtatttcggcgcgagacggagaacgagattgacgaggtatgcgaacggtcactccccgcaaggacagttgcgttctaaaccgcttgagacgcggcatggatcgcagcatggcggtacgcagccgtttcacgctggtccaatattgagtggactgtgcgggtgtgatattccgcccggaaaaagtggcatagtcggcctccctgccaagttgctgcaacgcctgattggcgataccaaactgatgagcgatggcatgcgcttgattacgcctggtgccggaaagtggtatgccgccgctttgtaccgccaaggttcgcagggcgttccatccggcggctatacgtgtgcgaggactgccgcgccgttgcgcgagggcaatcataagggctttgaacgccagaatcaggacgcaaaccgtcaatgtaatccacaacgggctgctatagatggctgctgtgcgcgctgctcgatggaactgtaaccagaacgattcatcagatgaagcgacttcggcatccgtgccggataaagcactctgccctctgacctgagtctggtctcgtaacggatcgatgaatggaacaggcggttggcgcacaagattcttcgggtcaggtggagccgagctctggctatcatccggaattttgctctccttcggagtagggtagaacgccacccatcccagattgcgaagtttgatttccacccatgcggttatgtcgtcgccggtgaaagtgatctcggtgccactgccagaagttttcttgccacgcgcgttggtgatgtctccatcctcatctttgggcaggaatcccaataccacgcgggaaggcagtcccaactcacgggccatcagggccatggcggaggcgtattgttcggagtctcctaccatggtggttccggtaagcagtgcgtttacacggtaattgccatgaccggcagccgaaggatagtcgttctgcaagccgtgggagaaccagccggagctccgcaacattgcagccaaatcttgggctgcggcacctcctcgggattggccgccggcagcggccgaagccagtgtgctaactgcattgggcacgtccagagctttcggctggctgatgttggcggctttggccgtgctgatttgttggtcggtaggggtgtcggcaataatgccggattcgatgtaagtcagtccttcgctggttcctgaggggagtatggctgaattggtatcgcggttgtaatagaacgggctgttctcatctttgccgaggaattgcacgccggtggcggcgccagctaggggaagccagacatcagcgagtcctcggtgcacagtgaaggtggcggtgaatgccatgccgcgttcatcagtgctgattgtggtgcctactcgttggtagttcgcgcaatcggaggctttggatgagtcggagagattccacactgagccgtcgaaccagtccatcactgccagtctgacgggagtgccggcaggcagattggtgatggtaagtagtgtgtcatctcgatgatccttgatataggatctcatgctgctcaacgggctggtgtaatcgtaggggctgagcggtggattgtacgtgtctcgcagtatgaggcggtgcggggatgccagtgcggaaccgccgacggccagcccggctgcaagagtcaccacgaccagtgcgcagaaccatcgttcccattccataaattccaatcgccatgccatccagatgatgagcagcacagcgaaggtgatgccgcatagggttcgatgccagccgtggctggtgccaagaagtgcgcatacggtcatggctgtggccagtggaatggctgcgattgcggacgtccacgcatggtcactgatggcgaacgtgcctgccaggaacgccagccataatccgatagtccatacggccatcagactgccatatgcggtgccgactggcggtgccaccgagatgagatatttgaatgctccgaacgtcatctcccatccctggctcaaggtatccaggctgggtatcacgtgagcgatggtggtggaaggcagtgctatgactgggccgatgatgaattgggtcaacgtcagaaaggtcagctgccaccatattgtgagtgagtatctggttccggcgaatgcgatcgccgtccctagtgcagtcgaaggaatggctgccgcaatccacatcatatggtccgcgtacacgtcaatgaggttcgattgagccagaaccatcatcagcgcaatagcggcaaggctgatgccctgttgtttcttggattgtctggcaatcatggcacaactcccaacatgagtggcagatcgttgagcttgccgatggtgattacagtgcaattggcgcatcgccttatgctgcaggtcatgccgatatctgcctgcagcactatgcaacgtgcagattgggggagtgccctggccatgcgtgttatgcggctgagggttttcttcgatccaacggtgacgacatacagggaagcgttggcgctgtgctgcaatgtgccatcgacaaggctcgcggtgaagtcttgctggaaggctatggcacttgtggcgtcaagaaacgacatggcgtcatgcggctgcgtgtgtgctttcccgacatgcacatataacgggcgatattgcagcaggcattgcacaccaatcgaagcgtgaatagaaaccgccatttcgaattcttccctcgaagcgtagtcgctttcatccacgctgagcgttaatgaggtatcagtgcgacatgtggcttcatattggcgaatcatcaaggaatctgctttggcggagcttggccaatggacgttgcgtatatcgtcgccgggctggtatttgcgcaggccatggaaatcaatatcatcgtctgcgattcgtctggaagattgaccttcgagatcgcgaggaataccggcgtgcagtaggggcagccgcacgattttcggatggatatacacgttgatgcgttctgccagatcgttttcatggcgggtaagaccgaatggatcgcctttgcgaatatgcaatggtccaataggcaataccgtccgggctggggcatgaaactccatgctgatgtgcttggtctgtttgggcaggagccgggggatgctgaatcgatggcggtcattgccgatgggaagaccgccttgggtgttggtggtgggtgctgtgccggagttgctgatgttcacggtgatggatattgtgccgtccacggtgatacggtgccgggaaacatgaatgctggcatcgaatttggtgttacctagagcaagcaggattgcgcagagcatcatcgtcgtggatgctatgccgaatgtgagcagttcgatccaacccagtaacgggaatgcgcacaagcatgctgtgccgcagcccgttgctgcccaacccagcggggaaacagaggaagtgaggcaatgccggattcgtgcagtggcttgtctgcatgcttggccgagctgccgtgtgtgatgcgcaattcccccgctgtgcttcgcctcggttttgttgtcgtggccgtactgccgtgtgtgatgcgcaatggtgacggatgggccggtcatgggcatggtcctttcacgtgctgacggtgggagccggcacctcttcaagaatctcctcaatgaggctttcttgggtgatgccgtcgaaaatggcttcggggaccagcatgatgcggtgggcaagtatgggcgtcgcaagatcgttgacgtcgtctggcactacatagtcgcggccgtcagcggcggcccagatacgggcgcagcgtgccaacgcaagagcacctcgcattgaggagcctatggagatactttcgtgatggcgggtcgcttcgaccagacgcacaatgtattcgtggatggcgtcgtcgatgtaaatgccagcagtcatgaggcgcaattgcagcacgtcatggctggtgagcaccggggagacggtttgtgcgcggtcggggatgtcgatttgtttgagtatgtcgatagacacctgttggctcgggtatccgatcgaggttctgataagaaagcgatccatctgggcttcgggcagcttgtaagtgccgagctgatcgaccggattctgcgtggcgatgacgatgaacggttgaggcacgttataggtggtgccgtccacggtgacttgctgctcttccataacctccaacagggcggattgggttttcggcgaagcgcggttgatttcgtcagccaatacgagagatgcaaagatcggccctttgcggaactcgaactcgtggtgctcctgatcgtagaaagtcacacccactacgtccgaaggcagcatatctggtgtgaattggatgcgcttgaagctggcgtcgatggaattggccaaagcccgtgccagctgggttttaccggtgccgggattgtcttcaagcagcacatgtccaccggccagtaatgcggtgacgcattgtttgatcggtgtggtcttaccagccactgcaatggcgatgttctcgaccagcgcattgaatgactgctgaaaataatgtatgtcgggtgttgcttgggcggcagtctgagcgaatgttccagcatgagaggttttcggacgctgggttgcatgcgatattggcttgaactgttgaagactgatattcgtgtcgtcacaaggggcttggtgctctaactcgggtggatagagagtttgtgccaattgggtgtcgtccggcagatatacggcatgcgatatccgagtggcgtctgaaagatatgtggcgtcatcgatggtggggttcatggtgttctcctgcggggtagtggattgagtgaagtcagtggacgtgaatgtggccgtagctgtggcgggtttggcatcgcgtgagggaataagagtggctgtgacggtgatctcgtcagcactgtctttctgattggatatatcgaagccaacagtgccgccggaacatccgatggtgtctgctgcggccccgctcaactcgatgcgctcgcacccggcgttgcgattattacccggcgtgattgttactgctggtatgtcgtcatcggcaagctcaatggatggagcatcggggtcgccccagatggcctttggttctgaagtcccggattccgggctccagccagctctgttatgtgctttgaccgtagccgttaccagggtcccgtcggagatgctgtcgttgttgaagatgaaggatagtttggtcgttgtatttccggtctctttggtctgcaatacgcccacgccgctgaccgtcaccatgtaattgtcaacctcactgaaatcgccatctatcgggctccaggtgatggcagctctggcattgcctccttccacagtgacattcacgggagctgtgggagtcttgtctggaatggcggtgacggctgcggaggccgccgaccagccgacatcgttgcgggcggagagagtgaaagaatatatcctgccgttcttcaaaccagtgattcggcatctggtggacgtgccacaggattgctctccgttgctggctccgctccatctcacccggtagtcggtaatggggctgccgttggccgcacctgctgaccaattaagtgtcaccacaccatcctgcgggtcgccggctatgggaaagagcagcggagcatcaggcttgtcgactatggaaagggtgatggtgccggtgacttcgcgtgctgtggccgtagtgccgtcccgcacggtgacgagcaccatgtttgaagaagctccgatgttgggcgaggcgctgatggtgatggctgttgaagagcagctggttatcgtgattttcgctgtgtcatcggcttgacatgcggtaacggtcagtggggaatcagggaacggattgtaagcgttctccaacggattcactgagccggaggagccggctttgagctgcaatgttgcggctgcaagtcgtgccagtggacgagtggattccaccacgcgaaccatcacgccggcatgcaccgtgcccttgccgtatgtgatgtgcacgggaatagaggcggtgactccggcgggcgcatttttggatgccgagatatgcagcttgcctgagctggacaacgaggacaagatatgctccgaagaggttccgcctgaggaatagacgcatcgtttctcgtcgtcatggagccctggaggcatgtgggtcagtgcggtcagatcaatggttttcggttcagcgccggcctcgatgtcaatggtgggtgaagaaaaggtgggcggtggtgttgttctgccaagtaccgtgatcggcagagtgaccacggctgtattgatgattgcggaggcgtcgggccggtttccatccgtcacggtgaaggtgattgaagctgggccggcatagtctttgatggcggtgaatttcagagttttgccatcgacgcggaaatcggtgttggacgctttggtggcggtgatggaatcggcgctttcgaggtacggttcttttccggcgcctacacgcacatagtcgttgatattgatgtgaacggtttggcgcgcgttgactatgatttccggtgccttggggcgcagcatgggtggaaacacgccatatgccggcacatgaataaaagcagtggacgtgacatggtgcgtggtgttggtcaccgtatacggcacggctctcgcctgcgaggtcaaatcaacggtgacgatggtggatgcgctgccttctccgactctcgcatggtcggtggctgagggatgtatggccacttccagttcgctggccgtgcctgaaggattggcgatccatggcgagacgtccacgtccacggattgcttgtcgatggtgtcggaggccggcacgcggcagtcataggcggcaggtggctcgatgggagcgcttggatctacgttgacggtgagcgtggcggtatctgccagtccggccgtgttgtacgcggtatacgcgatatgtgcggtggtggcatgctcgggtgtggtgaatagcagcatattgttttccaccatcacatcgtcgattccctgcgcttcaaccgtcgtgccgatggtcaaatcggtgttgtccgcggagatgtcgttgagcgttaccggcacgctggctgatgtattgggccgtagtgtgatgtcgtcatcgcgcgcatggacgctggattccgatgcgccctggaacacgcccacccgaatctgtgcctgcgctcgctgcccggtccaatcctccacggcataggaaaatatgtcggttccgcaagagtccggatatgcctcgtaaaccagatagtcggagccgacttcggcaatgcgtcctagttccggcgctgtgttgcccaatcccagcagctggtcatcgtcgccatccacgtcgatgccggtcagcgtgatgggaatgcgtacggtttggcctgcggctacttgtgcttcagtgttgtgcggtgtgggtgcggccttgtttccagcttggctttcatgcacggtgatgatgacgatgccggatgccgcattgcctgtatggtcttcaacggtgtaggtgacggggaagacccccgcttggctggatgcctgatatcgcacgatgctgccagacgtgaacaccagacccgcgaaggtgctttcgtcgtattgcagattgtctttgagcgtgatcgtagtgctgtcggagtatgtcacatggttaagtacgtctactgatacgatgccgccagtacgtacctggatgttgatgtcacctgctgtgggcgtggagctttccgccgccaacgccggtggatgcaacacaatggtgcctgtggcggtgccagccgcattggccacgttgtaacgaatgggaatgggtttggacggcacttggtgtgctgtgacatacacgcgtttatggtccaccaatccggctttgatgccggcgtcggaaggaacgtccaccgaggttacggatagcacgccacccatagggtcgatgtcatttgacagaggctccacaatcgccgtattgtcagtgcccagcagcgccacatcgttggccgccaccggtctggctgttgctttggttacggggtgcacatccacgcgagccaaaccggtggccggtatcgagccttggagtatggtgtacggcacatagtaggtgccgggtttggatgccgtgaatgcaatggacaaatcggacgggtgagcgattgtggaagcgccggacagcgtattcacatggctcagctgcattggctgcgtggaggtgccatgcacatagggcttgagctcgatgacggtatccgtatccggggtggtggccacggctattggatcgatgaccgcgggcaaggtgttcgccggtttgacggagaaatacatgaacccggtgccggtggccatgccgtctgagacggtgatctccactcccacgcggccggaggtcatatcgccggcattgaaggtgattttgccatcaggccgggtgaaaacctgcgccttatcggtgtattgcacgactgcggaaaccaaggtaagaggatccccatcgggatcaacgaagctgccaagcgcattggcgacgtaactggctccctgctccacattgatttcagatggggtgtcggattgcaacggtgtatggttgtctccatcgtgcagcgttaccgtgacgttggcggtcgaggtctgacctcgaccgtcggagatatcgtaggcgaacgttacggttccggccgatgctgcggaagcatcaagctgcagataccgcccggcatagattggcgagacggtgacgtcgcctccttggggcgcgcctactctgatgatgttcaataccgagcagtcggtctgttcgtcattgcgcaatacatcaagaatctgctcggatccagcgcgagctccgaatgcatcatcctcggctttgatgtcaccggattgctcggaacaggtttccgagaaatcctgatggttggtggcggaatcctcgtttcgctgggtactgtcatggtgctgcgtctgaatctggttccattgcatggcgatgaccgcagtgctgtcatctggattccagacattgccctcgatcacatcgttaagcaccgcaacccgatgattggtgcggaacaccagttcagaggtggcgtgtatcgattcaagcgtttggaatgcgatatgtgcactatcgggagtacaggttctgatgtaattgcgagcctgttggctccatgccgcgtatatgcatccattcacggaaaccggacgagccgcctggctcgtgccgccagtcaagtggaatatcggtttggcggtggaagaaagtcgtactattgcgagcccgcgtggagatgaggctgccacccaatcgttctgattgccgtcaacgggcggactctggagcgtgagtgtatctgaggcttcgatggtggtctgcccggaggcgtgaatgatggtattgcccgatgagattactggaacgccgccgatgacggtgaagctatcggctgctcgcggctgcccatccgtcaaggattcaagctgcttgatctgggaactatttgggctgtccaaccgaaataccacgccgtcacgggggcggtatccatagaccgctccatcgtgggtgactacgatgcggcctcctgtgccgagtctcatgcgcgggctatcgacggaaggcgacaccgcatcgagttcgtcggacgatccgacccatacgttgccggtgttctcgttgataaaggcaacggtgcttccgcctactgaggcagtggtatgtgccttgaggctggtctgcatactggtactgagcgtggaagatgcaatggctgaaaccttggtgggctcggccaaaatggtggtggcgttatgctgtgcgatgtcgaatcggggtgaagacgagacgacacttgcatcagcctcacggttcttgacgttgaaacgggcggctttctgattggcgagcgacgtgacccatacggtgccgtcatccagttgcacatgatgacgtgtgacgatgctgatcatgaccgccccggcaataagcacggtgagtatgagcagcgtgaatgcaggaaccgcccacgtgtagttgtcggagtgcggatggccgtgcctggcattcctgatgcgatgaaagtcagtatgcgattgggatgacgtgcccatgattctcctttgaatccttgccattgtgtgctgccccattgcagctgctatatgcgagactcacctgaatggtggtggatccggtgatgctatccatgcgtggcagcacggcacagacaaacaccagacacacagtgaccgctgtggtcgcaaccccggtcgcgataatggttggtttgacccaccggcgctgggtccgttcgttatgaaggtcgggttctcgagggcggcgtagatgagcaatctccttgggatatggcggtacgccatcaaccgtaagaggtgtgatccggccgaagaacgcatgctgggcgtgctgcatggctcgtgcgaattcgagcgcggaataataccgcagatcaggattcttggcgagggacttgcgcagtatctgttcgatgtttgtcggcacgtcggcacggttgatgcggggcagcggttggttgagaatcagacgaatcaactctgattgcgtgtgtggatgatattcatgttgatagggtgagcagccgacgagtagcgcgtatagtgtggctcccaatgaatagatatctgctcgttcggctccattgcccatatgcagcagcacttcgggaggtgcccaaggaggggaacatccggtttcggtgtggtcatacgcgtcagtggatatgccgaaatcactcagtgccggcaggccttgcccggtgatgagaatattgctgggcttgatatcgtggtgaatgatgttgctgcggtgggcggtaccgagcgctccagccaatttgattcctaagtccaatacctgagcacatgtcaaggaacgggatttcatcaaaggttcgtaagtaccgcctggcgcatattcgagaatcatatagccgtgaccgtcggcggtgacgtcggcgtgatacaacgtcagaatgtagggatgctcagagagccggaccatggcggcgttttcccgatggaactgggcggcaatgccacagtccaatgtctgattgctgacctttaccgccactggatgagcggacgtatgtaggcggtataggtacaccgttgcggtggtgcctgtgccaagtgcccgcacgaaatcgtatcccgacaggcgcggcggtgcatgcgaaatgatagccatgagagcccccccaaaattatcctcgttgatacagttccccaacttgtgtgatcgagaataccgttaaggataccggccaattgaatatgccggtacatatcttccgtttgtttccacgcgggctaatcttgaacgtatgactacgcaatggaacccagacgaactgttggacggcatcgcccaagacggcaaggtgaggctggtaacaggtgcgcccggagccggtaaaactgagtttgctttgtccgtactcacggcagggcttcgacgttttggcggtgccggggcggtgatggtcgtgcccggtcgtgtcgtcgcggatttgctgggcaatcgagtgattcgtgatatgggctcgtctgtacaggccaggccggtcaccacgttgggggctgtggcttttcgtgtgattgcggcatccagggccgcatctggattgcccttgccaagattgctgaatggtgccgaacaggatgcactgctgcggcaggtgatggccgtgcatatggcgcatgctgctgctggcgacgattgcgtaatctgtgcgttgcttagggaatactttgcccaagccgattgggccagtctggtgcaggatgccgatggagcagtgaccggaggttcgaccagcgccgatgtctttgcccgtggaatttcagacgcgttcatcgcccagctgcgcgatatgttggcgcgcttggatgaactgggcgtgaatccttctggggaggccgccttgttggcggacgttgcgcaggatgcgcgtcttctggtgcagtggcgcttggcgtttgccttgcgtagagaatatatcgccgcgcagagtgcggcatctgaggggcaataccgtttggatgcctcatatctgctggtggcgggcgctcgggaaatacatgatgctatggcaagcggccgttcggaggaacactccgattcgtggttggcatcacgaggattgcctcagctgctggttgtggatgatgcccaagacatcaccctggccggcatgaggttccttgaagagctgaatcacgccggtactgccatagtgctggtgggaaacccggacgaggcggtgcagaccttccgcggttcgtaccccgaatacctgatgaggcaagcggtgacgggaccgatgcaggccgtggagatgacattgcccagcgcggatttcgcaagcggtgagacttatgcctcgctggtcgcctctcgcgtatccctatcgattccttccgaagaggacgagccgttgcctcttgctcgtaggcccggcaagctggtgtccgcgctggataccggtgctgatatcccctcggatgatggcactgtgcagactggattgtatcgttccgcgcgcgaagagcttgacgatgtggtgtggcgcatgaagcgcgcacatctcgatcaccatatccagtggaatgatatggtcgtcatcgctcatgacaataccactgtgcgtacatacggggagcggctgaggcgcgatggcgtgcctgtccgatactcgtcggttacccgcccgctgaacagtgaatcgttcgtacaggggctgttcgccttgattgagttggcccggttgcgcgctgaaggtgtagcctcctgcaccatgagtctcgccgagaccgcttcctatgttcgtacacgagtgtccacggtgatgaacgggccgttggtgacggctggggccaaacccgggcaagggcggcctgcgcggttggcgccaatcgaatccgccatggcggcattggaatccctggcgccgatagcgggggataaggcgtcattgcatgggctgatttcctcgtgggagacgttgcgagaatcgtccgttgacggtcatgagcgggttgtcgtagacgatagcattatcggttttagcgctgatgccgatttggcattcggtgccgatgcgctgtatgtgatgcttgcctttgacgatgcgcaggctcctgccgagaatgtattggacgctatcaccgcagtgcttggcgccgacccgcaggctcgcgccttcatgaatctatggacgctggtcggcaagatatctcgagggttgagcaatttgcctccggagcagcgtagcaggccaagttatgcgctcgccgttgcgtggaatgccgcggcaatcacacctgtatggcagaaattggcattggcgaacacaccagatgggcgtgcggccaatgaccgacttgatgttgctatgaggctgttccaattcgctgaagattccaccgccagtcgggacatcatggggttcatagcgcaggtgcgtgccatgcaggtacaggccgattcgctggctcatattgggccagtggaaaatgcagtgacgttgaccactccggctggtactgcagggcggcattggcagtatgcctggttgccgtctctccaacaggatgtatggcccaatcttgccggccgcaacaccatgttcggtggtgaggatctggcggaactcgtgttgcgaggcaccttgaacaccgccgatgccgctggccatgatccccaattcattgcggtgctatccagtgagaagaaaagtttcctggtggcgttgaccagagcgtgccgttccgttaccgtcagtgccgtatggaacgacgacctcagcccatcggacttcctgttcggatatatgccggaatactatccgcgggataagcagcgggcacggtttacggacgtgggggagcagaccagcgaatcagggcttgatttatctggattggatggcgacccacgcggattggtgaccgcagcgcgcgtgattgtggcgacttcggaacctgactcgagcgaagctcgtgatgcggctgaaacgctcgcagtgttggctgaaaatggcatagccgccgctaatcctgacaactgggcgttcgcctcggccttatcaagacgagacacatcgtctgccgtatcgcccgcgtctggcagcaagcagacggaagatgatgagcgtacgtcaggcgatgatcacgcacctctcgttacgttatcgccttcggcggtggacggtctctgggcttgcccggtgtgctggctgttggagcaccaatttgcagggcctcaacccggctcggtgaacgcaggattcggcacccttatccacgcggtcgcacagcagggcagcgaagagggactggatcgtctcgactccgatgagtcggcacgcaatgccatggggataagcgatgcgtcatcagtgcagcagcgcatcgaagccgtgaccaagcgcatgattgtcatctatcaggaacagcgcccggatcccgaatcgatcgcggatactcgggaacgctacaccgccaagcgcaaagatgactccgccgccgatatcctggccaacatcgccagctattttgtgctcagcggcaccaataccgatgcctatttagacaagaatgtcggcaaattcgagattggcacgttgaccaaggccgattgcgaattgtcgttcgccgcgcgattcgacctgcatgacattgtggctgcttataacgcattgcctggtatgaggccagtagaccgcgataccttggccagcatgatgggcttcctagtgggcggatggccgtcaggtatgcgtaacgatctgaccgtgcgcttgtccggtcgcatcgatcgcatggaaacccgtatacttgcggatggcagtgagaacattcgcttgattgactacaaaaccggtgcggtacccaccgtcaagcagatattcaacgacttgcagttggtgtgttatcagctggggctggtctttcccgaagaggggctgcgagggagcgcagcattggctaatgcccctcgtatcgggcagagcgcgctattccatgtggcatacaacgatgcgccggccagaagctatgctccggaaggcgtgttccagccaccgctctttaccaacgggtcgctgaatgccgagccgttcaccgaccgcgcatggtataaggatcccgccaaattcttcgatatgccgataccggattcagctacgccgcctgcaggcgtggataccgagacctggaagcagttcgtctcgctgaccggcacccaagcattgtggtcgctgacaatgatcgcccgtgtattctacgcggccgcggccagccggtcgtccgtcatcaacgcccacccgcaggcaacgcatgtggcttattgccgtatgaccggcgtctgcccggcctgtgcaggcaagctcgataccgtgtttgaaacgaggcaggcatgagcgcttttattcccagcgtagaacaggcggccatcatcaacgctcccgctcaggatgacgtactggtggtggccggagccggctctggcaaaacctttacgatgacccagcgcatcatcgcgctcatcaaccgcggtgttgcgccggaacgcatactgggcctcacctttacccgcaaagctgccggagagttgctcgagcgtgtatccgcagcggtatcgcgcgaagattctcctgcagcacagggcgctcagactcctggcgcctcaactcccaacttcgacagggcgttcctgaaaccagccatttttacctatgatgccttcttccaaaccatcgtgcgccaatatggtctgttggttggtttcgatcagaatactcagccactcagcgaggctggagcgctccagctcgccactgaagtcatcgatgagcatatggatcaggctctgagcgaggatttgggcgcattcaccagtcttgccagaagcgtgctggcattatccggtgcaatcggcagtgccatgattggttccggctgcaccggattcgatgaggctgtggaacgcgtgcgtcagtgggactcggctttcgtcgacgcgcttcgtctcgctcttgagaacgaggacattcccgatatcgagccgacaattcccaagctcaagcgactcaaaaaagacagcgacaccgattggcaggcgaagctggacgacagggcgcagcggttgcatgcgcgctgtgcctaccattgtgcacaactgttggaaatcacgcgcaagcgcgaagtgctgctgcaattggtcgaggcctacgcacaagccaaacgccagaagaacatggcggaattctctgatttcaccattgcggcatatcagctcatcgagcgattcccctccatcggagagcgtacgcggtgtcgctacagtcatgtgctgctcgacgaataccaggacacctccaccacgcaggcggcactgcttgccgcattgttccatgtgaataactccgaaaggtgcgcggtcaacgccgtgggcgatccgttccagtccatctatgcttggcgaggagccagcccgggtgcgttccgcatgttccaacgtgactttcatatgccagcggagtccaagccattccctctttcggtcacatgccgtaacagtcgcatcgtgcttgaagcggccaacgatctgacgctgccgttgcgttcgcgccctgcccgtccctccagttcgttgatgcgcgaggtcgacgtatcctcgcttgaccccatgcctgacgcgcctgaaggcacgcttggtgtgttgggattggccactgcggggcaggaaatcgatgccgtagtgcgcttctgcaaggccgccatcgcgcggtatcgcgatgccggggccgcgcaggaggtgccggtcgccgtgctgttccggtccagatcccatatgcccgagtatcaggaggtattggagaaggccggtctcaccacgtttgtggtcggatattccgctctgctggagcgcccagaaatccgcgatgtgctggcattgctgcacgtcgttgccgaccataccgataccggagcgttgatgcggttgcttgccactccacggttcggtctttcttcggatgacctgaccgcactggcctgcgccgccgaagcgcagaatatggagcaacggttccgggctttggtgcaggccggtgtggctcctgctgatacgccaaggtcgcaatggggtgccgtggttcgcgaacatcgcgatcaggtggccaatgcagtgtttttgccggatctgctgatgcaggataattccagtgtgaggttggatcagctcagtgctcacggtagacatgccgtcgaacaggctgtggaggcactgcgtcaggtgcacgatatggtcggccggtcaatcacagatgtgattcgtgcggccatcgaggcgttgaatctcgatatcgataccgtgcttgccggtgctttgcgagacccgcagcatcgtgtcaatccatcgctggcccgcatgcccatggactccattgtggatttggtggacacctatacgcaagagatcgctgttgaacagacgcccacattacgtggattcatggcatgggtggatcatcttgccactgtggaagacgaggctgccaaactgcctggctctccggtggatgtggaattgatgaccgtgcaccaatccaagggattggaatgggatgcggttgccgtagtggggcttaatgccggaggatttcccagcaatcagggggatcacctcaaagtcgtgctggatgacaaccatcccggtggcactgaacaaggccaatggacagctcccgaataccacgagagcgcggattcgtggttgaccagccctgtggccgtaccggtgcccgtacgagccgatgccggaatcctgccgcgattccctcatgacgccgatgtgcatggcgatcccattgactcgttgcggaatctcgacgacgtggaactcatcgatgatgaggtgttcggctccatgcgcgaattcggcgatggcgtggaagaggtggatccgcaaagctggtacctgacccagtccgaggaatatggccgcagactgcacgctgacgaacgccgtctggcatacgtggcgcttacccgcgcccgcaacgacgccttgctgacctattgccgctataccggcgaatccagccgcgattgcacgaacgtgccgaaggggtctcgcgccgcaagtccgtccaacttctggcttgaggtgcatgacgcgttgcatggccacgaccatgcaatcgaagctcaggcatacgtggaaggtctgggatccgaagtggcgctggtctcgccccagggtgatcccattgatcctcccgaaggcttcatcgtgggggagaacgccgaacagtactgtgatgctgtggttggcgacgcatggcgtacgccgctggaacagacctccggccggaatgcattgccatggccggcgtcattgggcgaagacaccgcggaacatctgacccgcggtctcgccttggtgcgtaatgccatcaacggaaagcgcaacgcaaaagacgacggccacaacccggccggtccattgctgcaacgtgcgcaattgctggtcgatgacgacgatctcatgaccggcacattggagggtgcggcactcgacagggctgtcaaagccaaagcccagcgcattctggctgcgggacgtcagaacgtcaccagcttgcaggcgcgcgtgggtggtatgagccaacaggaggagcgctcctactggcgcagcgtgatacggcccatccctcgcgtgtcctcgccggctgccgaagcgggcacacgcttccacgactgggccgagcgtttcatcaatgccggtaagccggatgaggccgcatcgtcggttgattccagcgccgccgaaatcattaccaccggcaatggcgtatcccgcagcgacctattggccgacctgaacgccatcgaccaacaatctgtaccggtctgcgaccggaacctcatgatatggcagcagcgtctggcctcgtcttcatgggcgcaacgcaccccggtatgggccgaacgctcaatcgtggtggatgtgccggaagtcggcatcgtgaacggcaaattggacgcggtgttcctcggcggaatcaatccagccgatacctccaaacggtacaccgtggtcgattggaaaaccggtcatcggcctaccaagccggatgatgtggagcataaactcgctcagctcgacatgtatcggttactgctcgccgcggtcgagggcgtggaattggacagtatcgacgccactctctactatgtcagtgagcccgatgaaggcttgcgcgagcttcatgcccgcgcgaaaaccaaacaggaaatccttaccgagttgagctccgggatccccgaacaatctgacaacgactgagtcgcaaggctcatgacctgtactccagctggctggcgtgacgagcgcgtgcccgacagtgtgggtccgcggttgaaacgcaccgcgtgacgttgctcgggcaccgctaccctcggaaggctcgtgtgggcgggcgcacgtgccgaacaacgcaccagtaaggagttgcacgtgtctacggctcgcgctgtatccaagtcgtctgccacccattcgccgtaccagcggctgttctcgctgcccggaaccaaagcgttctgcatatccggggcagtggcccgtcttccaatctccatgatgagccttggcattgtgctggcactcaatcatttgtacgataactggacgattgccggcaccatgagcgctgcctatgtgctcgccatgagctgtgtcaccccgttctacgcgcgcgctttcgaccgattcggccaggcccgtgtcggccgtcttgcactcgccgtgcaaatcgtcgccatgctggccttcgccttcgcagcgctgatacgagtgccgattccactgttgttcgtattggccatcatcatgggtctgacccagttctcctttggcgccttggtcagaacccgctggtcatatgcgttgcgcggtgccgaagatggcgagcaactactcaacaccgcttacgccatggaagcggccatcgatgagattgtatttatcctcggcccgatcctggccgcgtggttggccacctcggtgcacccggtttctcagctgtttgtgccaaccatggcttgcggcataggcggcaccgtgttcttctcactgagatccacccaaccgccggtcatcgtggaacaggtcactgtggccgccgccgacaatggccatccaacaccaagcgatgacgccgatcagctgacgctccgccagctcaaacgcagcggagccaagcccaagagtgtgttgctctatgccggtgtgttgcctctgctggccgtgttcatcgtattcaacatgagctttacctcctttgacgtgtcgatcaccgccacgatgaaatccatggggctagagcctttcctcggcctgcagctggccatgttcgcagtcggctcctgcatcggagcactggttttcggctcgcggaagatcaagggttcccattgggcacatatggtgatgttcctcagcctgttgactgtgggatacgtgttcttccgcctgaccatggacaacctcatcctgttgggcgccatggagattctgtccggacttgtggtctcgccaacattcgccaccggcaacctcatcgtcaaggatttggtgccgcccgaatccctgaccgaaggcctgagctgggtgaccaccgcaggcacggtcggtacatcaatcggctcatccgtggctggcattgtgctcgacgcctccagcccgcatgtcggcatgatgctgccgttcctattcacgctggcttcagtaccgctggccttggctggttgggcgctggccaaacggcgtgtgtagatggacgcgggtattggcgcgaggccttgctggtgataggctgattgccggttgaataacagcgttaacaagaagcagggagtacgaatgatcaaggtttcggtggtcggtgccaaaggacgtatgggctcgtatgtggtcgaagcagtgaacaacgccgcagacacacagctggcgcttgctttggacgccggcgacgacctgacccgaatcgcccccgacaacactgatgtcgtggtcgagttcacggtaccgtccgtcagcctgaacaacgtacttaccctgattggccaaggtgtggatgtggtggtcggcaccactggctggactgatgagaagctcgcccaggtcaaggaagccatcgcgggcgggcccaagcccgaaacccagaaggtgttcatcgcccccaacttcgcgatttccgctgtgctggccgactactttgccaccaaggccgccaaatacttcgaatccgcggaagtcatcgaactgcaccaccccaccaaggtggacgccccctctggcaccgccatccacactgcccatggcatcgccgaagcgcgcaaggccgccggtatggctctcgtgccggatgccaccgaaaccgacggcggctcacgcggtcaggtggtcgacggcattcacgtgcatgccgtgcgcctgcgcggcctcaacgcccatgaggaagtgttgttcggcaacgccggcgagcaactcaccattcgtgccgatagcttcgaccgcaccagcttcatgccgggcgtgctgcttgccgttcgcaagctcgccactgacgcccctgctggcctgaccatcggcctcgatcacttccttgatctgtaagccggcggtagtcgccagtcaagacgtgacgaacgattgactggcgactgccggccataatggtacgtaacgtaagagtccacattgggaagtacggtgaacactatgagtgagcatgacatgcatcttcttgacccagcgccttttggccgcattttgccggctatggtaacccctatgaaatccgacggcagtgtcgatttcgatgctgcgcagaagctcgccaagcagctcgtcgccgatggtgcggatggtctggtggtcaatggcaccactggtgaatcgccggtcacccacatggacgagaaggttaatctggtcaaggcggtcaaggaagtcgttgacgttccggtgatttccggtgctggatccaatgacacggctcataccgtgcgtatggtcgagcagactcaggaagcgggcgccgatgcggtgctcgtcgtcatgccctattattcccgcccctcgcaggacggtatcgtcggccattacaaggccgtcgacgaatccgcagaaaagccgattatcgtctatgacgttcccggccgtaccggcttgaaggtcaaggtcaacacttacgaccgtttggccgaactcgaacacgtcaaggccgtcaaggacgccaccggcgatcttgcagccgcagtggagaagcagcagcgcaccggcctcgcctggtattccggcgatgacggcttgttcctgccgttcctttccattggcgccgtcggcatcatttcggtgattgcccatgtcgcctccaaccccatgcagcagcttgtccaggcatttgatcgaggcgacatcaccaccgcccgccgtcttgccaatcagcttgccccgcttgtccacgcgctcaatggcgacggctatcaggccgtcatggccaaggccgcgctgaaggtcagaggagttattccctccaccaccatgcgcctgccgaatatcggccccgatgccgctcagctcgacaaggctgaagagggcatgcgcgccgccggactgctctaagcccctgcatacgggttgccatcccgccgcttccgcatgacagagcggaagcaacactcaagaaaacaattaagaagttatggcaacagaacagaagaaaacaaagacaaccaaaagctccaactctcgtcgtcgcggttccgcccgcaacagcaaggccaacggttccaacagccgcacgccgtctcgtaagatcaacgccacccagcaggccaccgctccccagcaggatgccgtgctgatcgccccgccgaagtaccgcaagggctccatgcgcatcacgccgctcggcggcttgggcgaaattggccgcaacatgaacgtgatcgaatacaacggtcacctgctgcttatcgactgcggcgtgctcttccctgaagaggagcagccgggtgtcgatctcatcctgcctgatttcagctacatcaagaaccgtctcgacaaggttgacgccctggtgctcacccacggccatgaagaccacatcggtggcgtgccttacctgctgaagctgcgcccggatattccactgattggttccaaactgactcttgcctttgtggacgccaagtgtaaggaacaccgccagaaccccaccaaggtggaggtctccggccgcgacaagctcaaggtgggtccgttcgacctcgaattcgtcaacgtcacccactccatcccggatgccctggccgtttacgtcaagaccccagccggctccctgattgacacgggcgacatcaagctcgaccagctgccgctcgatcatcgcatcaccgatctcgtggagttcggcaagatcggcgaaaagggtgtggatcttttgatgatggattccaccaacgccgaggttcctggcttcgtcaagccggagacctccattggtccggctcttgaccaggcatttgcgcaggctacccgcaagatcatcgtcgccagcttctcctcccatgtgcaccgcgtgcagcaggtggtggatgccgcccacaagtacggccgcaaggtcgtgtttgtcggccgttcgatggtgcgcaacatgtccatcgctgccgatcttggctatctgcacattcctgaaggcaccgttgtggacctcaagaaggccaacgacattcaggacgacaagctcgtctacatgtgcaccggctcccaaggcgagccgatggccgcccttggccgtatcgccgacggcaaccaccgtgacatccatatcaatgagttcgacacggtgattctcgccagctccttgattccgggtaacgagcacggcgtctacaaggtcatcaacaagctggtgcagctcggcgccaaggtcgtcaaccgcgacaatgccgccgtgcacgtgtccggtcactgcaatgagggcgagctgctgtacatgtacaacatcgtcaagcccaagtgcgccatgcctatccacggcgaaaaccgccatctggtggccaacggactgattgccgtcaagaccggtgtcgacccgcagaacgtggtgctggccgaggacggcgacgtggtcgacctgtatcacggcaaggccgcggtcgtcggctccgtgccgtgcggctacgtgtacgtcgacggcgattccgtcggcgagctgaccgacgaggagctggagaagcgccgcatcctcggcaccgagggcttcgtctccgcgttcgtggtggtcgacaccgataaccacgaggtcgtcaccggcccgaagatctacctgaacgccgtggcagaggacgaaagcgagttcgacaaggtgcgtcaccaggttgtcgaacagctgaacgacgcgatgatgcagggcactcgcgacacctacaagctgcagcagattatgcgtcgtacactcggcggatgggttgcccgtcagcttcaccgtaagccgatgatcgtgcctgtcgtggccgacatcgctcaagacgtcgaaatcgtagacaacaactgatcaggattatccagggacgaccgtaaggagtaattgaagtcatgcccggttccaatctcactcgtgtcgaggccgaagcacgcaaggccatcgttgaggcaccgattcactatcatgtcgaccttgacctgacggttggcccgaagaacttcggttccaaggcgctgatctgcttcaatgcgaagcctggttcatcgacattccttgacctgattgccgatgaggtcaccgccatcgagctcaatggcaagtctctggacccggctacggcgttccaggacaaccgcattgagcttacggatctgaaggaaaagaacgaggtcaccgtcgaggcgctgtgccgctactccaacaccggcgaaggcctgcaccgttcggtcgacccgtccgatggcaacatctatctgtactcccagttcgaggtgccggatgcccgccgcgtctacgccgtgttcgaccaacctgacctgaaggccaccttcgatttcaaggtgctcgctcccgccagctggatcgtcacctccaacatgccggtcgccaccatcgaggacgatccgcgcgaaaccctggacggcacacttggcgataagccgaacgaaagcacccgcctctgggacttccagccgaccccggtgatgagctcctacctgaccgccatctgcgccggcccgtacgccgaatggcacaccgaataccttaacgaggatggccgtaccgtgccgatggcccagtattgccgccagtccctggccgaggccttctccaaggacgtcgattatctgttcgacatcaccaagaagggcttcgcgttctacgccaagacctggggcgtgccttatccgtacgccaagttcgaccagatctacgtgcctgaatacaacgcgggcgccatggagaacatcggcatggtcaccatccgcgactcctacgtgttcgagtccaaggtgaccgatgcgctggccgagcgccgcgtggtcaccgtgctgcacgagctggctcacatgtggtttggtgactacgtgaccatgaagtggtggaacgacctgtggctcaacgagtccttcgcggagttcacctccacgctggccaccgccgaggccaccgaatggcacgatgcctgggctaccttctgctccggcgagaagagctgggcgctgcgtcaggatcagctgcccaccacgcacccgatcgtcgccccgatcaacgacctcaacgacacctacgtcaacttcgacggcatcacctatgccaagggcgcgtccgtcttgaaacagctggtgttctacgtgggccgtgagcgcttcttcgaaggcatccacaactatctcatccgccatgcctattccaacgccacgctggccgacctgctgggcgagctggagaagacctccggccgtgacctgaaggcctggagcgccaagtggctcgaggaatccggcatcaacacgatcgccgctgatattaagacgaacgccaacggcaccatcgccgagctcaagctcacccagagcgccccggccgagcacccggtgctgcgcccgcatcgtctggccatcggtttctacaacgaagatgccgagaccggcaagatcgtgcgcactgaacagttcgagctcgatgtggacggcgagaccaccatcgtcgaagccgcggccggcaagcagcgcccggccttcgtgctgattaacgacgatgacctgacctacaccaagattcgcttcgatgccgagtctcaggccttcgccgaagccaacctgcagcgtttcgacgatgctctggcccgcgccgtgacctggctcgccttctgggatatgacccgtgacggcgaattcccggccgaatgcttcgtggacatgaccctgcgtctgctggccacggaaaccgaatccaccaccttccgctatgcactggcctgcatgagcaccaccgcccaccactatgtggcccccgcacgtcgcgaggaggtgctgcgccacgtggccgccgagctgtggacgctggccaacgccgccgaagccggttcggacacccagttccaacttgccaccgcgtacctgggctatggcgaagagggtgacgcggcattcgccgccaatgcgcgtggtctgctggacggtaccgtgacgctggacggtctggacatcgacaacaacttcacatggaccatcatccagtcgctcacctccgtcaacgagatgaccaacgaggacgtggacgcgcagcttgccaagaaggacaccactgaaaaccgtgagttcgcttacggcgctcgcgcttcgatggccacggttgaggccaaggaatgggcttgggatcaggcgctgcacaacgacgaactgaccaactcccagcttgaggccgtggcccgtggcttctccgccactccgcgagccgatctggtcgagccgtttgctgccaagtatttcgagaccgttgactgggtctgggccaacaagacctatcacatggccgaggcgttgctcaacggcctgtacccgggctactccgatcccgccacgctgaccaagcttggtgacgcctggcttgaggaacacattgccgccgacaacgccctgaagcgtctgatcgtcgaaaacgtggcctcctcccaccgcaccctcaaggtccgcgaatacaacgaggccctctgatttctggctcccctctctgaggggagccccttccgcgaggaacctcgtccacattccaacataaaacccgcaaccaatccccaacagcgtattctcactcaaggtcggcaatgtaccggtcgacgagcagaaggatacggggaatgattgcgggttttgcttcgctgagggccgttcagtggggtgtttcctcggtttggtcgaggttttgcttcgctggtgactgctcagtggggtacatcctcaatcggctcgaggttttgctttgctgaggggctgtgagcggggtgaattttcgactggttcgtggttttgcctcgctgagggttgttcagtggggtgtttcctcggttgatccgatgatttgcttcgctgatggacccccggcgcagattccgtggcggtttttcgttgggttggtgtttggggtggagcgcagcgactacgatggtgcgggtaacgcgatacaaggagtggaacttcattatgccgaacatgtttggaaccgatggcgtacgaggactggccaatagggatttgaccgcacgactggcgctggatctgggcgacgccgccgtgcgtgtgctcggtgacgccggtacgcaggacgaccagcccgagggccgccgccgtgcgctggtgggccgtgatacccgcgtttccggtgatttcctggcttccgcgctgtccgcaggcatgtctgccggcggcttcgacgtgatcgatgccggcatcatccccactcctggcgtggcctacctgactagcgtgctcaacgtcgaaatgggtgccgtgatttccgcctcccacaacccgatgcccgacaacggcatcaagttcttcgcacgcggcggcttcaagctgcccgaccagaaggaagacgacatcgaggccgtgctcggccaggactgggaccgcccgaccggtgccggcgtgggccgcgtgagccacgaccagaccaccgccaccaacctgtacatcgaccatctggtttccaccatcgcgccgctgaacgatgaccagacccagcccaagccgctcaagggcctgaagatcgtggccgactgcgccaacggcgccacttccgtggtggcccccgaagcgctgcgtcgcgcaggcgcggacgtcatcgtgatcaacgcctcgccggacggctacaacatcaacaagaacgccggctccacccaccccgagcagctgcaggccatggtcaaagccaccgatgctgtgatgggcgtagctttcgacggtgacgccgatcgctgcctggcagtggacgaagacggcaacatgatcaacggcgatcagatcatgggcatcctcgcccgcgccaagcagcgtgaaggcaagctcaaccacgacaccctcgtggtcaccgtgatgagcaacctcgggctgaagctcgccctgaaagacatgggcatcaagaccgtggaaaccggcgtgggtgatcgctacgtgctggaagaaatgctcaagggcgattactccctcggcggcgaacagtccggccatgtgatcaaccgtgagttcgccaccaccggcgacggcacccttactgccctgatcctgtgcaatgaggtcgtcaagtccggcaagagcctcaaggaacttgccgcagacttcccgcagctgccgcagaccctcatcaatgtgccgaacgtcgacaagaaggccgccgccgccaacaagcgcatccaggaagccgtggcccacgaggaacagctgctgggcgactccggccgcgtgctgctgcgtccctccggcaccgagccgctcgtgcgcgtgatggccgaggcagccacccaggcctacgccgacgaagtctgcacccgcctcgccaagatcgtggccgaagaactggcgctataacacaccacggctttgctcccgctggcgggagctgtcagccgcaggctgactgagagtggttgatgaggctgaaccgcatggaaccaccctcagtctcattccattcgacagctcccgccagcgggagcagcaaaggaaaacacatgtttgggaaaaacgccaaagtagacttggaacttaaccgcgatgtcgaacgtctgattaaatccggcggcaaagaacagattctgcccatcgtgcaggctggtgaaccagtgctgcgccagcagaccgtggcctacaatggccaactttccaagcgcacgcttgccaaactcatcgacaccatgcacaccaccatgctcgaagcgcctggagtgggcttggccgccacgcagatcgggctcggattggcgcttgccgtagtcgaggaccatgtgcgtgacgatgaggacgatccgcgtgaaatcgccgagttcccgttccatgtgatcatcaaccccaagtacacgccggtgggggagaagaccaccagcttcttcgagggatgcctgagctttgatggctatcaggccgtgcgtaagcgctggcttgacatcaccgctgaatgggacgatgaagacggcaaacatcacagcgaacagctgcacggttggccggctcgtatcttccagcacgagaccgatcacctgagcggcgaactatacatcgacaaggccgaaatccgttcgctgaccaccagtgaaaatctcgaagacctctggtgcgacgacccggtacccacagaggccgccgaagaacttggttttgcattatgaccgattccgcctggcttgagaccgccaaagatgacatcgctcagtgggcgatggtcatgaccaaggacgcggatgataaccccattgattggcggtgggtacgttcgcttgacctgtttggcggacttggacacgcggccggtgacaatccggcccctcaagccatccatgatgcactcaaagccgactacgccgtgcgcgatcgcttggagccgatcatcgcgcaatgcaacaccgcattcatgactgactttgatcgaatcatcgcatcctaccgtctgccacgcgcactggcttatgtcaatcggcgattgaacgacaccatcaacaccttgcttgatgcgggggagcgccggcacctgtggaaggtaagtcgtgaacggcaggggagaggcatggcagcggtgctcaagccgtattccagcgccacagcagatcccaatcaaggcacacttgatgccgaggctgaaggtgcggacggttttgccggcactgtggatatcgccctcgacgatattcaagaccgctccgcggcgattctcaacgccagagccgaacggcgcagggccaagcgtgagcaaagccacgcgggtagggtggatatggctcgtgccaatctctccggtgcaacggcaccgggtgggagcgtcaccttgtttagcaatgactcgtcaagttctggtgccgccgcgcataagcccaaatcggattggcgtgatgcctacctgccgggacgtgacgtggacatggtgatgggcatcgacatcgaaaccaccggcaccgatccggctcgcgactacatcatcgatgtcggctttgaatttatgaacatggtcagtccgcgtccgaccgatgtgccgaacggttatgcgtatgagcagggctactacgatgccggtgacgcctatggccagtctcgccttgacttcggtgttcccccggccaatgcggctctcggcaacgaactcattcgcaaactcaccggtatcgatgtgcgagaccgcagcagcaaggccggtcatcggcttttcgatgaatggccggaagcccagaccggtctgctcgcgcgcctgacccagcagccatatgtggcgcacaatgccaccttcgaacacagctggttcatgctaaatgtcgccggatacgccgaagcctatcgcgccggtcgcatcaccatcatcgacaccctgcccatgagcaggcaatgggatcctggctcagtgcccaacgatgaacacccctatggtgataacacccttgatgcttatgccaagcgtcagggatcgcttgattcagcccataacgaacggcatcttggactggaagacacgcatatcatgctggtggccatgaaacaccatctcgcaaccctcaaggcgcaggggcagggcccgtggggtccgggcggcagaagcggcgtgggtggcaaatcatgcggtcgtaagtggtgagtacactactgacttcgtgagtgaatatcaggacagccgacaacagcgcgaaaaccgccgccgcaccatcgtgcgcgtggtgtgcatcgtcgtggctgttgccatgcttggctccctgattgtccctgctatctatgcaggtctttgacgttgccttcgtgcatttgcgcccgcggttgagcgcgtctgatgcagaaggagtgacgagaaaagcctgctgatcggctgcagaaacactcttacgacatcacaacatcgcggtgccagaaccattacggaatgtgcgaaggctgtcaacgaggacgcgacatccaagaaaactcgaagtatcaacagttaaggtaagacacgatggcagaatttgactttacccaggcgattggcgaagctcgcgccaagtacgattccatcgccaaggcgttggatgtggaccgtctcaaggcggatatcaaggatcttgaggcgcaggcggcggctccgggattgtgggacaaccctgacaacgcacagaaaatcaccagcaagctctccgcagcggaatcgcagctcaagcgtctgacttccgcatcccagcgcatcgacgacgtggagacgctcgtcgagctcggccaggaggaacaggatcaggaatccttggacgaggcgcagaacgagatcggcgagattcagaaggatctcgaccaaatggagatacagaccctgcttgacggcgaatacgacgaacgttccgccgtggtgaccatccgctccggcgcgggtggcgtggatgccgccgacttcgcgcagatgctgctgcgcatgtacctgcgctactgcgagcgcaacggcttcaaggccaaggtcatggacacctcctacgccgaagaggccggcatcaagtccgccacgttccaggtggacgccccttatgcatacggccgactgtctgtggaaggcggcactcaccgtctggtgcgtatctccccgttcgacaatcagggccgccgccagaccagcttcgccgctgtggaagtggtgcctctggttgaggccaccgatcacgttgacattccggacacggatatccgtgtggacacctactgctcctccggccccggcggccagggtgtgaacaccacgtactccgccgtgcgcatcacccacttgcccaccggcatcgtggtcaccatgcaggacgagcgctcgcagattcagaaccgcgcctccgccatggccgtgctccagtcccgattgctggtgctgcgacacgaggaagaggccaagaagaagaaggagctcgccggagacatcaaggccagctggggcgatcagatgcgttcctacgtgctgcatccctaccagatggtcaaggatctgcgtaccggttacgagaccagccagacccaggccgtgttcgatggtgacatcaacaacttcatcgaagccggcatccgctggcgtcatgaacagcgtcgtgctgccgagaacgaggagtaatcatggctttgattgcattggacgatgtgtccaagatttaccccaagggtactcggcccgcgcttgatggcatcaacctcagcatagagcgtggcgacttcgtgttcctggtgggcgcatccggatccggtaaaaccacgctgctgagcctgctgttgcgcgaggaggaggccaccagcggtgagattcgtgtggccggcaacgacttgcgccgtatcgccaaccgtcaggtgccgcattaccgccgtacgctgggcttcgtgttccaggactacaagctgctcaacaacaaaaccgtgtgggagaacgtggcgttcgcgctcgaggtgatcggtacccgccgttccaccattaagtctttggtgcccaaggtgctggacaccgtgggtcttaccggcaaagagaagaactatccgcatgagctgtccggtggcgagcagcagcgcgtggccatcgcccgtgcgtatgtgaaccacccgcagatcctgttggccgacgagcccaccggcaaccttgacccgaccacatcgctgggcattatggaggtgttggacgctatcaaccgtaccggcaccaccatcgtgatggccacacataacgaagagatcgtcaactcgatgcgcaagcgcgttgtcgaactgcacggtggcaagatcgtgcgtgatgaggcccacggttcctacgattccgccctgtacttccccgatgccgaggccgaagctaaattcggcagggccaaccacatccccgatgcccggaccaacgccatcgccgcgccggaggagggcgagccgtccgaaggcatcgcacgtctggccaattccgtgcattccgggcgaaccggccgctacggtgagacttttgcgccgttggaagacacgttgacatggggcaagggcctgactttggacgagcaggctgcatccctcgaagccacccaggctttcgattcgttgcatcccgaggaaagtgtcagcagtacgacagtcgaggtttccgaaacgctcgctgtgccggagacgtccgttgccggtgagatacctgagcagcagtccgtcggcgacggcgaagggacgaaccaggccgagccctcgtcagtgcaagcagacgaggtgcctatgccgccggctccgccagccccacctgcgccgccgagcgccgaatcccagagtgcaaccagcgaaggcaaggaggagtagcccatgcgtatgcgattcatcctgtctgaaacaggaaccaatctgaggcgtaacctgtccatgctgctctcgctcatgctggtcacgttcatctcattcctgttcatcggcgcttccgtgcttactcaggcccagatcaccaaggccaagggcgattggtatgacaaggtcgaagtcgtggtttggctgtgcccggatggtacgagccagtccgccaactgcgcatccggtaagtcgccgtctgcggccgaaatcacggcactgcagaagaccatccgcgacgagctcaacgatgtggtgtccaacatcaactatgtgagcaagcaggacttctacaacaacaccttcaccaagcagtacccgaatggcgaattccaaggtcgtacgctgactgccgacgatatgcaggattccctgtggctgaagctcaaggaccccaccaagtatcaggtggtcgccgaagtgctctccagtaaggagggcgtggaagacgtcaccgatcagcggcagatcttcgatcccgtattcgccattctgaatcgcgccactgcggtcacggccgttctggcaggcgtaatggtgttggtggccatcctgctgaccggtactacgattcgcatgtccgcagcatccagacgcactgaaaccgaaatcatgcggtacgtgggtgcctcgaactggacgattcgtctgcccttcatcttggaaggcgccatcgcttccggtatcggttcgatactctcctgcgtgatgttgtcggtaatcgtgcatgtgttcatcaccgggtggttggctcaatcagtgacttggattccgtacgtgaatcagatgaccgtgctgctgatttccccgttcctggtcgtgggggcggtgctgctttcggtgattgcctccaccatttctctgcgacggtaccttcgcgcgtaagacgtatcacactcactgcgggtggcgttcccagattcgcatgttatggtgtggtctattgcgacggaaaggatttatatgactaaggcgaaaacgatgaggccagtgttggccgcatgcgcggccagcgccatatgcgtggccgggctgctggccagccctgttcagccggcgcgggcaaacacctattcgaatttggtcaatgcgcagagccagcatgccgcatccgtgcagcgtgaagcccatctaaagcagcagctagccggtgcgagcaccgaactggccgacaagatcatggaattggatgatctgaccaacaacaagatcgtcgccgcgcaggataaagtcacccaggccaatgccgacgccgccacggctcaggaagaagccgatgccgctgcctcaagactggaagccgcgcagaaggacaaggaagatctcgaggctcagatcgagaaaaccggtaaggactacgacgacgcccatgccgctgtggcccaattggcccgtgaagagcagcatggttccgatgcctcggagattatgagcgtggtcactggtgcctcgagtaccaaggacttcgtcaactcgatgcagtcgcgtgacgcactgtctcgtaacgaggctaatgctgcctcctcagcggccaccgagcttaatacctcgatgaaccgcagcgagcgtctggacgcgatcgagaagcagatcgccacactgaagacccaggccgacaacaaggccgccgcggctcagagcgccgcggaaaccgcgcaaaatgagcgtgatgctctggaacagctgcgccaggagggcgaagccaggcgcaatgaactgaccggtatggtgtccagcctgaagtcccagtcggcgaagcaggccgcacagaccgtgctgatcgcttctcaggtggattcctacaaccagcagtacatcaaggaacaggcaaccgccaacggccaggtcagcagcggccagcagagcactggtggttcggccgcacctgctccttccgcacctgctccgtccgctccctccggtggcagcacgtctgccggcggaagcacgggacagggcacctcgaatggtgatgtcggcaaccggtatgtggccggccaatgcacgtggtatgcgtacaaccggcgtaaggagatgggcatcggcacgccatcgttcctgcacaatggcggccagtggtacatttacgctccccaatacggtttgcgggtggatcacagcccgcaggttggcgcggctctctccttcccgccgggtgtggctggcgctgatggctactacggtcacgtggccgtggtggaagccgtgtacggcaactcgattctgatttccgaaatgaacgtcaagggcgagttcatcgtcagccagcgcgttctgtacaatcccggtcagtactggtacgttcactgatccggctgtaccgaattacgttatgcaaggccccgtttggggccttgttcgtatgtgcagatggttcatgatattctcatatgttgcgttgcacccacgaaaggagggaacccatgcccaaggaggccggcgaaaagctgatcgtgcagaataagaaggcccggcacgactacgccatcgaagacaagtatgaggccggattggcgttgaccggcactgaggtcaagtcattgcgcgaaggccgcgcgtctctgtccgaggcgttcgtttccatcgatcgccgtggagagatgtggcttgagggggcgaatatccccgaatacctgaacggcacatggaacaatcatgcgcccaagcgcaagcgtaagctgttgctgcatcgcgtgcagatcacgaagctcgctcgcggcatcgaggccaagggatacacgattgtgccgttgagcctgtatttcaaggacggtcgcgtcaaagcggaaatcgcccttgcccgaggcaagagggaattcgacaagcgtcaggctctacgtgaggagcaggacaagcgcgaggccctgcgcgccatgcgctatgccaacatgcgtcactgatttgtccacgttgcggactttttcgcccatgattaacgccttggtagcacaacgctcctaatctctggagccatctgggaaacatacccgcccagctgactatccggagagaggaaatccaatgtctctaagcaagggaatacaatccgctgcggccgcagctctgagcgccgccatgctgatcgccgtggccgcctgcggcacgagcgatagcgcggacactgcatccaaatctgctgattccaaagattcatccagtacgcaaggcttcgacaccagcggcatcaagaaagacgatgagatcgccgcgctgctgcccgattccgtggccggcgacggcacgctgaccgtcggcaccgatacttcctatgccccggccgagttcctggccgaggacggcaggaccccggtcggctttgatgtcgacctgtccaaggcgctggccgcagtgttcggactgaaggaaaacaccgtctcctccacgttcgattcgattatcccgtccgtcggctccaagtacgacatcggcatctcctccttcaccgtgaccaaggagcgcatggaggccgtggacttcgtgacctacttcaaggccggttccacgtttgtggtgcagaagggcaacccgaagaagatcgatacctccaacctgtgtggcgtgaaggtggctgtgcagaccggtaccacccaggaagaggaagtcaacaaggataacgagcagtgcaaggcggacggtaaggatgccatcgacatccagtcctccaagctgcagaccgatgtgaccaccgccgtggcttccggtaaggctgatatcttctacgccgatacgccggttgccggctacgccatcaagcagaccggtgatacgctcgaggccctcggcgaggatgttggcgtgacccctgaggccgtggccgtcaagaagggcgattccaagaccgccgaagccgtgcagaaggccatccagaagctgatggatgatggcacgtataagaagatcctcgacacgtggggcgtctcttccggtgccgtcgacaaggccgagatcaatccgtccatcgaatagtttcggttactatgaagactcccgttgctctgcggcgggagtctatttgtatatgtatgcactgtggtgtataaatatgcttaaccgttgatcgttgccgcataagcggcgtaagagagaagaagaaacgattatgcagtccaccaaactgaagtccatgatggccatggcgctgagctcggccatgctgttcgccaccgccgcttgcggcacctccgacaaggccgatgccggtacggactccgccaagggctccgatgccgccaccatcaccagctacgatgtcagctccgtgaagaaggacgacgccatcgccgccctgctgcccgaatccgtgaccaaggacggcaagctcaccatcggcaccaatccttcctacgccccggccgaattcctcgacgctgacggcaagacccagatcggctatgacatggacctcgcccgtgcgctgggcaacatcttcggtttggacaccgaaatcgtctcctccaacttcgacaccatcatcccggccatcggcaccaagtatgacctcggcatcgccgcgttcaccatcaccaaggaacgtatgcagtccgtggacttcgtctcctacttcaccgccggcatgggctacgcggtggccaaaggcaaccccaagaacgtgaacccggatgacctgtgcggcctgaacgtcgccgtcgagaccggcaccgtcgaggaggacgccatcaacgagaccgccaagcagtgcaaggcggacggcaagaaggacatcaccatccagtcctccaagcagcagaccgacgccaccaccgccgtggtgaccggcaaggccgacgtgttcttcgccgattccccggtggtcggctacgccatcgcccagaccgagggccagctggaacagctcggcaaggacttcgactccgtgccgaacgccatcgccatcaagaagagcgattcccagaccaccgatgccgtgcagaaggccatgcagaagctcatggacgacggcacctacggcaagattctccagcactggggtgtggaatccggcgctctggacaaggccgagatcaacccgtccgtcgactgagcgtacacagcggtcaatcagcatcaagcaatccagatggggcgtactgtatgtaacacaggcgccccatctgtgcgctaaggttcaacgctagttgcaactatcgcagcccaggctgcccaaagacacccaaggaaccaaactatggcgaagaaagaagtcgacggcgaaggattgaacatccccaaccgcatcaaggcgctgccggtcaagcgccccggcccgattgtggccgccgtgattgtggtgctgctcgccgcgatgtttattcagggcatgatcagcaatccacgattggattggcccacggtctggaagtacctattcaacgagaacgtacttgaaggtatccagtacacgctcaccctgaccgtgatttccatggtcgtggccatcatcctgtcggtgattctcgccattatgcgcaagtccatcaatccggtgctgcgcggtgtcagctggttcttcatctggttcttccgcggtacgcctgtgtacacgcagctcatcttctggggtctgttcgccgtgctgattccaaaaatcagccttggcattccctttacctcagtgaaattctggagcatcgactccaacgtggtggtcactgcattcaatgcggcgtggattggcttggccctgaacgaggccgcctacctgtccgaaatcgtgcgcgccggtcttgaagccgtggatcccggccagactgaggccgccaaggcgctgggcatgaaccgcacacttatcatgcgtcgtattgtgctgccgcaggccatgcgcatcatcatcccgcccaccggcaacgagaccatcggcatgctgaagaccacctcgctggtcaccgccgtgccgttcaccctcgaactgcagtttgccaccaacgccatcgccaaccgtatctacaagccgattccactgctgatcgtggcctgcttctggtatctgctgattacctccatccttatggtgtgccagtcccgcctcgaagcgcacttcggcaagggcttcgatgcccgaccggtgggcaccaagggcaagcaggcgccattgccgggtaagaccgacggtgagccgaaggatgacgtggacaagctcaaccagaccacatttgtcggattgaatgcataaggcgggagtgcgattatgactatgaatgacatcaccagtgttgtcccagccgtgcacaaggcggctgacggttccgtgattcccgctgtcaaggcggtgcaggtgcacaaggccttcggcccactgcatgtgctcaagggcatcgatctgaccgttatgcccggtaccgtgacggtgattctgggaccctctggttccggcaagtccacattcctacgcctgatcaaccagctggagactttgaccggcggttcgatcgaggtggacggcgaactcatcggatacaagcatgtgaccaagaacggtcaggatgtgctgcagactctggatgacaaggagatcgctgcgcagcgttcccgcctgggcatggtgttccagcgcttcaacctgttcccgcacatgaccgccctcgaaaacgtgatggaagctccggtgcatgtgcagcacaagtccaagagtgaagcacgcgcactggccgaagccgagttgcagcgcgtcggtctgggcgatcgtatggattactacccgtcacagctttccggtggccagcagcagcgtgtggccatcgcccgtgctctggccatgaagccggaaatcatgctgttcgacgagccgacttccgcccttgaccccgagctggtgggcgaagtgctcaatgtgatgctttccttggccaaggagggtatgacgatggtgtgcgtgacgcacgagatcggctttgcacgtgaggtcgccgatcagattgtgtttatggatggtggtgtggtcgtggagaaaggcggccccgaaatcatcgacaatccgaccgaaccgaggttcaaagacttcctgcagcacgtgctgtagtccgcactctggctcccccctgaagaggggaaccgttttttgcgcccccgctggcgggggggctgtcatgcaacgcataactgggggtggttcctctgatatggcgggaaccacccccagtcggctccgccaacagcccccgccagcgggggcacggctagggccccgcatgttccaatcctgcaaaggcggcgggttggattcgcttcaggcaatgtttgtccgctaggctggtgagccatgtgtggaatcgttggatatgcgggaaatgtggaaacggcgtgcggcaagcccttggaggtctgtctgcaaggcttggaacgtctggaataccgaggatatgattcagccggcgtggcgctgaccgcacccggcatggataaagtgaccgtgcgcaagaaggccggtcgtctgaagaatctggtcgaagacatcgaacgtaagccaatgccgctggccaccgtgggtatcggccatacgcgttgggcaaccaacggcgagccgagcgatgtgaacgcacatccgcataccagtatggacggcaaagtcgccatcattcacaacggcatcatcgagaacgcctcccagctgcgccttgatctgcaggccgagggctaccgattcgcctccgccacggataccgaagtggccgccaagctgctgggcaaaatcgtggacaagatcattgcggaagagggcaagccgaacctgttcaaggcagtgcgccgcatggcccgcatgttggaaggcgcattcaccattctggccaccgactgccgtcagccggatatcgtggtcggcgcccgtcatgattctccgctggttgtgggccttggcgatggcgagaacttcctcggctccgatgtggccgcattcgtggcatataccaagcgcgccatggaagtcgatcaggatcaggccgtgtgcgtatccgccgataaggtcattgttaccgacttcgacggcaatgtgattgagaatccgaagacctacaccgtggactgggacgcctcggccgccgaaaagggtggctgggattcctttatggacaaggaaatccacgaggatccggccgccgtgcagcgcacgctgctgggccgtttcgacccaaacggcgacatcaccctcgatgaggtgcgcatcgaccagcatgactttaaggccattgacaagattatcgtcgtggcctgcggcaccgccagctatgccggtcaggtggccaagtacgccatcgaacactgggtgcgtatcccagtggaaatcgaactcgcgcacgaattccgttaccgcgacccgattctgaccccgcgtacgctcgtggtggccatctctcagtccggtgaaaccatggatacgctgatggccctgcgccacgcgcgcgaacaaggctccaaagtgctggccatctgcaacacgcagggtgcttccattcctcgcgaatccgacgccgtgctctacacgcacgccggcccggaagtcgccgttgcctccaccaaggccttcgtggcgcagatcaccgccgcctatttgctgggcctgtatctggcgcaggtcaagggtgcgatgttccgcgacgagattcatcaggtgcttgactccctgaaggacatgccgcgcaagatccagtgggtgctcgacacgcagcccaagaccatccaggccgccgccgagcgcatggtgaatgccaactccttcctgttccttggccgccatgtgggatacccggtggcgctggaaggtgcgctgaagctcaaggagatcgcctacacctttaccgagggctttgcggccggcgaattgaagcatggcccgattgcactggtggacgagggtgagcccgtggtgttcatcgtgccgccggagcgtggccgcaatgtgctgcacgccaaggtgatttccggcatcgaggaggtcaaggctcgtggcgcgtacatcattgccgtggccgagcagggcgacccggatgtggaacggtatgctgatgtggtgttctggcgcccggcctgcccgacgctgatgagcccgctggtggatgtggtgccgctgcagctgttcgccatggatatggccaagctcaagggctatgacgtggataagccccgcaacctcgccaagtccgtcaccgttgagtaagccacaccgatacgttattgacgagcctcatattccgtttgagatggacgtgctgtatgaggacgagcggatcattgtggtggataagccgcattttctggctaccatgccgcgcggcatgtggtatcgcgaaaccgcgctgatccgattgcgcgagcgtctgggggagccggatatcacaccggcccaccgtttggatcgcatgactgcgggcgtactggtctttgtgcgtgatccggcttgccgtggagcgtatcagatgctgttccagaacaagcaagccaccaaggtctatgaatgtctggcatcgtgcgcgccgattcgtcgaccgcgattcggcacgattacacaggctgagccgccgcgtccgtttccgttgctgcgccgttcgcacatcaccaaggagcgtggcacgttggccgccttcgaggagccgggcgcagtcaatgctgagaccctgatcgagcgcggcgaactcatacttacttccgctggcgggaggtggcgcgaagcgccggagggtggtccctgtctggagaatccccccatctgccgctacacgcttcatccgcgcaccggcaaaacccatcaactgcgcgtccacatgaactcactgggcctacccattgtgggtgacgatttctacccgcgcatccagacgcgcctttacgacgatttcagccaaccattgcaattggtcgcacgtgtgctgcgcttcaccgacccagtaacagggaagcgacaagaattcgtttcccgtataccattaatcagctaatgtcgcggacggaaccgcgctcgatgagttcggtggggattacggttttgatgccggccggtactttctcgccttcgcattgacggcggaccatggagaacgcggtggcgccgatggcgtcattgcgcatgcgcatggtggtgaggttgagtcttggcaccacgtcgaccagcgaatcgtccacgcccacaatgcttacgtcttccggcacgcgcttgccggctgattccaatccgagcatcgcaccgtaggccatctgatcgttggccgcatagattgcggtgcattccgggtcgtgagccagcgccacgcctgcctgatagccggagtcggcacaccagtcgccgatatacatgctcggtacgcgcgcgcctatttgttccaaggcttcacgccagccttgcgctcggctttcggcagcacgtgaagtgactgggccggcgatatggtagacggtcttatggcctttgctcatcaaatagtcgacgatggctgtggagcatccgtattgatcggcgtcaacggtggggcagtggtcggctgccgcctcggaaatcagcacaaccggtagttctcgcggtggtttgtatcccacgaagtcggaaatgcgttcctcaagcaccacgatgacgccatctacgggttgacgttgcatgcggtcgatggcggaggccagcgtacgttctgcgccgttgctcatagtctgaatggtgacggaatagccgtcctcggctgcatgggtgacaatggaatcgagtatccgggcattaccgaacctggtggtgtcgaacatcactacgccgatatcctggaatcgcccatgcttcaatgctcgggcggcgtaattcggacgatatccgaggcgttccatcgcggcttcaacgcgctggcgggtttccggcttgaccgcattgctgtcattcgccacacgggatacggtttgcggcgaaacgccggccgccttagccacatcttgcatggaaacctgtgttggtctcgccatctcgcccctcgcttgtctctcaaacgacagcggtcataccgctgcgatgtctaccatgtatcgcgtgaacggtcacgataacatcattgttttcgtgaccattgtaacagctagcgcaaaaacattgaattcaacacgattggacaatgttatgaatggtgttatgatgataacgtaaacaattttggtcaaccttcgaaggagaggggttggaaatggcttcagccgatgtcgctgccgtgcctatgcacacggataaagcgcgtgagaacaagcataaggccgattggcgtggatggaagttcatgtggccgttcacggtggtgttcgtgttcgtgttcattattccgattgtgtacgccatctacatcagcttcttcaagaagcagatgatcggcggcacgaggttcgtcggggtcgagaactacgcgcgcctgctgcaggacggccagttctggtcgtccgtgggtcgtgtggcgctgttcacctgcgtgcaggtgccgatcatgctgttcctgtcggctgccatggccctcgccctggattcgatgaagctgcacggcgccaagttcttccgcatcagcacgttcctgccctatgcggtgcccgcggtggtgtccacgttggtgtggggcttcgtgtacggcgcgaagtacggcctggtgggctcgttcaacgacttcttcggcacgaacgtcgacgtgctgcagccgagcgtgctgcttgcctccatcggcaacatcagcacgtgggagttcaccggctacaacatgctgatcttctactcgtcgctgtccaccatcccgcactccctgtacgaggccgcgtccatcgacggcgcctccgaatggcagatcgtcaagtccatcaagctgcccgagctgaagggctcgctggccatcacggtgatcttctcgatcatcggcagcttccagctgttcaacgagccgagcatcttgcagaacatggttccgggcaacgcgatcaccacgtactacacgccgaacatgtacgcgtacaacctgagcttctccggcaaccagtcgaattacgcggccgctctggccatcgtgatggccgtcatcaccatggccatcgcctacgccgtgcagctgaagagcatgaaggagcagatgaagtgacgacgaccgcccgtattgccggattggtttcgattgtgaaggagcgtgcgtgatgagtgccgcagcatctacccgtctgactgacgccgaactgaaggcgcaggagaaggccgccaggaaggccgagaaggaacgccagaagcgcatcgccgccgatgaggcggccgagcgcaggcgcagcgccagggccggtttcgcgaacgtgagcaacccgcgccgttcgaccctgatgaccgtgctgtgcgcgatcttcgccgtgtactgcctgttcccgttcgtgtacctggtgatcaacgccaccaagacccaggccgacttcacctccacgttcggcctcggcttcggcaagagcttcgccctgtgggacaacatcgtcacggtgttcacctaccagggcggcatcttcggccgctggctggtcaacaccctgctctacgtggtcgtcggcgccggcggcgccaccctcctggccatcatgggcggctacgcgctggccaagttccgcttcccgggccgcaaggccgtgttcgccgtgatcatcggctcgatctccgtgccgggcatcgccctggccgtgccgcagttcctcctgttcgccaagctgggcctgaccaacaccccgtgggccatgatcatcccgtcgctgatctccccgttcggcctgtacctgatgtggatcttcagcgagcaggccgtgcccaccgagctcctggaggccgcccgcgtggacggcgcgtccgagttccgcacgttctggaccatcagcctgccccttctggcccccggtatcgtgacgaccgccctgttcacgatcgtggcgacgtggaacaactacttcctgccgttgatcatgttgaaggacgccgactggtacccgctgaccatcggtctgaaccagtggaaggaccaggcctcgaccgcgggcggccaggccatccagaacctggtgatcaccggctccctgatcacgatcatcccgctggtcatcgcgttcctgtgcctgcagaagtactggcagtccggcctcgccgcaggcgccgtcaaggagtaaccgtacttcggctcccttctggtggagggagccgagataaaggcataaccactaacaggaaggaggcgtctatgcagatattcgcattgttgagaatcgtgcaggcgcctccttgtgtatctgcgtgactcccatttgcccacacgtagatatttattcattaaaggaacagcatcatcatggaacatcgcgaattcaagtggccgcagcctcttgcgggtggcaagccccgcatctggtacggcggcgattacaaccccgaccaatggcctgaggaagtgtgggacgaagatgtagccctcatgcagaaggccggcgtcaacctcgtctccgtagccatcttctcttgggccaagcttgagcccgaagaaggcgtgtatgacttcgattggctcgaccgcgtcatcgacaagctcggcaaggccggcatcgccgtcgatctcgcctccggcaccgcatccccgccgatgtggatgacccaggcccacccggagatcctctgggtcgactaccgcggcgacgtctgccagcccggtgcccgacagcactggcgggccaccagcccggtcttccttgactacgcgctcaacctgtgtcgcaagatggccgagcactacaaggacaacccctatgtggtctcttggcacgtgagcaacgagtacggctgccacaaccgcttcgactactccgaagatgctgagcgcgccttccagaagtggtgcgagaagaagtacggcaccatcgacgccgtcaatgacgcctggggcaccgccttctgggcgcagcgcatgaacaacttctccgagatcatcccgccgcgcttcatcggcgatggcaacttcatgaacccgggcaaactgcttgactggaagcgcttcagctccgacgccctgctcgacttttacaaggccgagcgcgacgccctgctcgagatcgcccccaagccgcagaccaccaacttcatggtctccgccggcggtgccggcatcgattacgacaagtggggttacgacgtggacttcgtgtccaacgatcactacttcactcctggcgaagctcacttcgacgagctggcttactcggcctccctgtgcgacggcatcgcccgcaagaatccgtggttcctcatggagcactccagctccgccgtcaattggcgtccgatcaactaccgcgtcgaacccggcgaactggtgcgtgactccctggcccacctggccatgggctccgacgccatctgctacttccagtggcgccagtccaaggccggtgccgagaagtggcactcctcgatggttcctcacgcgggccccgactcccagatcttccgcgacgtgtgcgagctgggtgccgacctcaacaaacttgctgacgagggcctgctgagcaccaagctggtcaagtccaaggtcgccgtcgtcttcgattacgagtcccagtgggctacggaacacaccgccacgcctactcaggaggtacgccattggaccgagccgctcgcgtggttccgcgcgctggcggacaacggtctgaccgcagacgtggtgccggttcgcggcccctgggacgagtacgaagccgtcgtgctgccgagcctgaccatcctgtctgaagagaccacgcaccgcgtgcgcgagtatgtggcgaacggcggcaagctgttcgtgacctactacaccggtctggtggacgacaaggatcacgtctggctgggtggctaccccggctccatccgtgacgtggtgggcgtgcgcgttgaggaattcgccccgatgggcaacgacttccccggtgccatggaccacctcgacttggacaacgggaccgtggcgcacgatttcgccgacgtgatcacctccgtggccgataccgctcacgtggttgcttccttcaaggccgataagtggaccggtttcgacggcgctcccgccatcaccgtcaacgacttcggcgacggcaaggccgcatacgtcggtgcccgtctcggccgtgagggtttggccaagagcctgcccgtgctgctggaggaactcggcatcgagacttcggctgaggacgatcgcggtgaagtgctgcgcgtcgagcgtgcggacgaaactggcgagaaccacttcgtgttcctgttcaaccgcacccacgatgttgcggtcgtggacgtggaaggcgaaccgctggtcgcctcgctggcccaggtcaacgaatccgagcatacggcggccattcagccgaacggtgtgctggtggtaaagctgtaaagaggtctatttatagcgattcaaatgcgatggcgggcgtgttagcgataacacgcccgccatcgcatttgcgatttgttttgagatgtgtatactaaaagatgttatcgcaaccatagcgaaaggaatggcttcatagagccacttctcagtgtcgaggagaaatcaataattgacactaggtaacacgcaatgattgcgagcgacaaaacagtttgaatcgttctagacgattcgaggaaggagaacagaacgatgaagttcactaccgccaagaaggccgttgccctcaccggtgcggttgccatgctggtttccgttgccgcctgcggctctgatagcggcaagtccagccagccggctcaggattccgacgtcaaggaaatcaccgtctgggcttgggagccttcgctgacccaggttgccaaggacttcgagaaggagaccggcatcaaggtcgacctgaagaacgtcggtaccaacaccaaggaatacactcagctggacaacgccattgaggctggctctggcgctccggacgtcgctcaggttgagtactacgccgtcccgcagtacgccatcaagggcaacctgctggacatcaccgacaagacctctggttacaaggacttctacacccctggcccgtgggcttctgtgcagttcgccggcaaggtctacggcctgccgatggattccggcccaatggccttcttctacaacaaggaagtcttcgacaaggccggcgttgatgccgagcagatcaagacctgggatcagtactacgacgccgccaagaagattcacgccctcggcgacaactactacatcacctccgacaccggcgacgccggcttcttcgactccatgacctggctggccggcgccaagccgttccagacctcctccgatggttccgaagtcaccgtcaacctgaccgaagacaagggcgtcaagaccttcaccgacttctggcagaagctgctggacgagggtctgctcgacaccaagaccgccggctggtccgaggattggttcaagggcatggtcgacggcaccatcgcctccctgttcactggcgcttggatgcctgccaaccttgctaactccgctgctgacggtgccggcaagtggcgtgtgacccagatgccgaccgctgacggctccaccaccaactctgagaacggtggttcttcgctggctgtgctcgcctccaccaagaaggctgatgctgcttaccagttcatcgagtacgccaaccacggtgctggtgtggccactcgtgtggctggcggcgccttcccggctgacaaggcctccctggaaaaggactccttcaagaacgccaccaccgtgaagaacgccgatggtcaggatgttgactacttcggtggtcagaagtacaacgaggttctggctcaggctgctgagaacgtgtcctccggctaccagttcctgcccttcgaggtcaaggcccgcaccatcttcggcgactactttggcaagtcctacaccggtgaccagaagctgagcgacggtgtcgctgcttggcagaaggccctgcaggattacggcaaggatcagggcttcaccgtgaagtaagccttataactccctctctatatatccacagcagccccgtgacgcatctcgccacggggctgctgccgtattggctcccgctggcaggagctggctcgcgaggcgagactgagggtgattcatcatacggcgttttaagccccgcctagtagactcgtcaccatgcgaacaatcggacggcgaatcagcagactggcgaccatagtcgtggccgcggtccttaccgtatccctagcctcctgcggccaagtcacggtcgataaccgtaccgaaatcagcgtatggagctgggaacccagcatgggcgaagtcatccgccgtttcgagaaagccaatccggacatccgcgtcgaatggaccaacatctccggctatgagaatctcaataccgccatccaggacggctacggcacgccggatgtggcgcagatcgaatactacgcgctgccgcaatacgaggtatccggtcagctgctcgacctaaccgatcgtaccggttccgattatgcgagtttctttacccttggcacctggtcgtccgtccagcttgccggacgagtgtatgcattgccgatggattccggccccatgggattcttctacaacgaggatgtgttccagcaggccggggtggatgccacgcaaatcaagacatggaacgattattacgaggccgccaagaaactcaagcaaattggcgcttatattgcggccgattcgggcgatggcagcttctacgacgccatgatatggcttgcgggcggtcagcctttccatacctcgccggacggtaaaaccgtgaccatcgatctggaccacgataccggcacccagctgttcaccgaattctggcaaaagatgatcgatgaaggcctggtggacaccacgtccgccacatggtctgagcgatggaagcgcagggtgggcaccggcaccattgcttccatgttctccggcgcatggatgccttcgatgctgctatccaatgtgcccggcgcgtccggactatggcgtgtggcgcccatgcccacctatgacggccagcccaccaatgccgaaagcggcggatccgcacttgccgtgttgcagctgacgcgtaagccggatgcggcctatcgattcgtggatttcgtgacccatgacgcgcagggcatcagtgcccgtgtggctggcggtgccttccctgccgactatgacaccctcaattccggtgaattcctcgataagaccacgatcacgaacgatcgtggcgtcgaaattccgtatttcggcgggcagaaattcaaccgtgtgctttccgaagcggccgaggatgtatccgtgggatatcagtatctgccgtttgaagtgtatgcacgtaacgatttcaagagcacggtaggcaaagcctatgaatgggccagcagcaaacaggcctacgaacagcgtgagatggaagtcgatatgggtatgaaagacgagaaaggcaagccgctggaatcgttggacaggcccggcaagaaagtcagtcttgaacacgggcttgccacctggcagaaagatctcaaggaatacggcttcaaccagggcttcacgattaagtagctcctcgctaacctccctctgacgagggaggtggccgccgaaggcggacggagggagagacctgagggaaggcctagctaaaggccgatttcgttacttcacattgcgggcgtagatatgcgccatgcccttgaagatgagatccgggtcatagacgtcaatcagctcggtatcataggcgaacacgcgcccaaggccaccggtggtgatcaccttgaagtcctcgccgccaagctccttgcggaactggctgattgtgcgttccacgccgcccaggaacgtgtaatacaggcctgcctgcatgcaggtcttggtattggtgcccaaaatggtctccggtcgggtaatctccacttccggcagctgggccgtgtctccccatagggcggcggcgcctgcacgaatgccggtggtgattacgcccgaatcgaccatgcccttatcgctcacatgcgtgaacgtggtggccgtaccgaaatcggccaccagcaccggaccgccatactcgtaataggcgccggcgcagtcggccagaatgtccgcgccgagtgatttcgggtcatccacgcgcacgttcatgccggtcttgatgccggggcccaccaccatcgggtcgatatccaagaacttgacgatggaggagcggaaggaatgcatcaccttcggcaccaccgaacagatgatcacgtcatccacatcggacggctggaaaccgctcattctcaggaattcggtcaaaaacaggccgtattcatcggatgtatggttggctttggtggtgatgcggtaggttccggcgatggcgtcgccatccagaaaaccaagcacgatgttcgtattgccgatatcaacggcgaccagcatgataaccctccagattcaagatggatttcatgtgcaattctacagccccgcagctatgatgggctgtggtggacgacccgtttgtggcggccaaccgtataaaccaacatatatagaggaagaaccatgtctcaagacaatggtgcgcacgtcgaagacggcgcaaccacagatgcgagccttgcctcgcgcgcaaagaatccgaagaagaacagcccgaagtggtggctgattgccttggccgttgtcgtggtggtggcggttatcgccggcgccgccttcgccttcggcggtaagaaagactccaagaacgcggcctcgtccggtacctatgccgacaccgtgaccatcggtctcaaactggctcccaccaatctggacattcgtaacaccgccggctccgcgctcgaccagatcctgatcggcaacgtgtacgagggtctggtggcccgcgactccaagaatcaggtcgttcccgccatcgcctccagctgggagacgtccaaggacggcctgacctataccttccacctcaacaagaacatgaccttctccaacggcgacaagctcgacgccgaagacgtggcctggtccatcaacgaactcatcgccaaggactatcacgacgccgacgcgctcgctgccgtcgataaggtcgaggccaaggacgccgacaccgtggtcatcacactcaagagcgcgaactccaacctgctgtggaccctgaccggccgccccggactggtgttcgacaaggatgccaagtacgacctgaagacccaggccatcggctccggcccgtacaccgtctccaagttcgtggagaacagctcgatcacgctgaaggccaacgacaagtactggggcaagaacaaggccaagacgcccaccgtggtggtcaagtacttggctgacgacaacgccgcggtcaacgccctgaagtccggcgatgtgcaagtgctcgccccgattaccgagaacctcgccgagccgttcaagtccgattccgcgaactacacggtcaaggccggtgacggcaccgacaagttcgtgctcggcttcaacaacgcctccggttccaagttggccgacaagcgcattcgccaggccatccgttacgccatcaaccacaaggaactcatcgcctcccgtggcggcgccgacaaggcgctcggcggcccgattccgtccctcgaccccggttacgaggatttgaccaacctgtatccctacgatcagggcaaggccaagtcgcttatggctcaggccggttactccgccgacaagccgctggaactcagcctgacctacgccaacatttatggcaccgagctcggcgaccagctgcgttcgcagctgaagcccatcggcattgatctgaaggtcaacgtggtggaattctccacctggttgcaggacgtgtacaccaaccacgatttcgatatctcactggtggaccacaacgaaagccacgacttcgcttcctggaccgacccgacctactacttcggctacgacaacaaggacgtgaccaagctgtacaacgagggcgtggccgccacttccgacaaggagcgtgacgccaagttcgccgaggccgccaagttggtgtccgaggacgccgctgcggattggctgttcaattaccgcaccaccaccgccacggccaagggtgtcaagggcttccccctcaacctcaaccagaccgtcttgcccctctataacgtgacctactccgtcgctggattcagccagaagtagttacgttttttcgggctcccgctggcgggagctgtccgcgaagcggactgaggatggcctcagtcatcctcctcctatgacctctcctcagtcgctgcgcgacaactcccctcagagaggggggagccgtcaccgtaggcgactgaggggagccaaaggaaagtaaccccaagtaaagtaggcattatgcgattcgtgctcaaacgactggcgctgtttgtcatagcgttgctcggcctgtccgtggtgattttcgcggcattgcgcattctgcccggcgacgtggcctccgtgatggctggcgtcaactcgccgcccgagcgcgtggcccagttgcgcgaacagctcggcttgaatcggccattagtcgcgcaatactttgattggatgggtgcactgatccatggtgatttcggcacgtccatcctgaccggtcgttccgtaacctcactggtcggctcgcgcgcagccatcacctttcctctgatcattcttggcatgttgattgccttggtcattggcctgccgctgggttgtgcagcggtgctggctcgctccgagcgagtgcgttccgtattccatgtgctggccatcatcggcggtgccatccctgccctgtggggtggattgctgctgattctgctattcggccgtggcgtcggactgattggcgtcttcccttcgcaagggttccctctggacggttggggagcgcccggttcggcgatgctgtcgttgattttgccggcgttgtcggtcggtgtcatcgtgggcgcgaccatcatgcgatacacgcgttcggctctggacgatttggccggttccggttatatcgacatggctcgttcctgcggcatgacccgcacccaggcagtgctgcatgtcggcctgaggttggcgaccccgcaactggtgtccgttatcggactgacgttcgcctcgatgatcaccggcgtgatggtcatcgaaaacctgtttgccctgccgggtatcggcaatggtctcgtaaccgacgtgggcaatcgtgacctcatcgccgtgcagagtgagctgtttttgctggctgcattctttctgttgattggtcttgtggtcgactttctccaccgcgtgctcgacccgcgcctcaaaaccgccgccaccattacggaggtgaccgcatgagcaaatcgtctacttccttctcgccgtctgtagtcgagggggagcgtgttcccaatcctcccgctgatgtgaggtggcgtcgcaccgcgatgccggagggtggtcaacgagcggctttcgcaatcgtcctccactccatgtggcgccgggccgaaggcaaattcgcgcttatcgtgctcgcctcatggctgctgatcgccatcgtttctttgttctggaccccgcaatccctatggaccaccgacggctaccgcgtatgggccaaaccctccgccgtgcattggctcggcaccgacggtaccggagccgacgtgttcagctggctgcttgccggctcacatacgaacctgctcatcgtgctgcttaccgtagtggtttccgccgcttgggggctgctgctcattgcggcgatggtcgcacgcaatgcggcgcttgccagctcgtctgtagtggtggtcgatgcgctgatctccattcccactgtgcttatcgcgctgattcttgctgtaccgctcggtgcgtccatcgtcgtgatcgttatcgcttgcggcttcggatacgggctgaatctggcacgtgtggcccgtccggtggcgttgctggcggcccgttcatcgtatgtggaatcggccctggcgaatggagccagcggatggcgtgtgttggtgagccatatcgtgccgagtatcctgcccgtgctggccgtacaactgtcactgtccgctggcacggcggtgctggccgaatcaggacttacgtacctcggtgtcggtgtgccgtcgggtgtgccgagctgggggcattcactggccacatcggtcaagctcatcaatgtgtttccgctgaccgtggtgtggcccggtctgattgtcacggtcgtggtggtggccctgaatattttcggcgatgtgttgcgtgatgccatcgacccggtcgccaatcccgcgttgagggaagcaggggagggcggcgatgagcgttgatattcatggtctgaacattgctgtcggcggcagattaattgtttccgatgtggacttggccattgccgatggcgagcgggttggcctaatcggttcctccggctccggcaaatcgatgatttccaaggcgatactggggctgctgccattgactgctgcagccgacgggtcgattgatatgagcggtacggaaatcatcggtgcctctgagcatgtgctcgccgacctgcgtggccggtatgtgggcgcggtatttcagaatccggctgcttcactgaacccagtgatgactgtcgcccagcagatttctctaccgctgaaattgcattatgacctgaccaaggccgaacgtgccgaccgagtgaatgccatgctggacaaggtcgggctggaccgtgatatggccggcaaatatccgcatgagttgtctggtgggcagcagcagcgcgtgggcatcgccacggcgctgatcacctcgccgcggttcatcatcgccgatgagccgaccaccgcgttggattccatcacccagcgacagattgtggatctgctggtctctctagtggacgatgccggtgcctcgatgctgttcatcacccatgatttctccgtgttggcacgtgccacaacgcgttgttatgtgctggacgctggccgcattgcggagtccggcgcgaccgccaatctgcttgccgcaccggccacgctacaggcccaacgactggtcgccgccgcccaaaccctcaccctccgcactcccaaggaggactctcatgagtgatggcaataggctcctcctctccgcccaatccatcaacaaatccttcggtccccgctccgcgcgccgccaagtcctcttcgacgtctccgccgacgtccgccctggcgaatgcttggccgtcatcggcggttccggttccggcaagtccacgctgacccgcatcatgctcggcctcgaatccgccgattccggcactgtgacgtatggcggtcaatccatcgccggtggtcgcagatcacccggtgtgcaagcgctccgccgcgaatcgggactggtgtttcaggacccgttctcgtcgcttgacccgcgttggcgggttgctcagtcagttgccgaaccattggtgttgcagcggcatgacctcggtaaagccgaaatcgctgagcgagcgaccgcggctctgaccatggttggccttgaaccggccactttcctgaaccggtatccggtcgacttgtccggaggtcaggcgcagcgcgtggttatcgcgcgagccatcatcaacgagcccaaagtgattcttgccgacgagcctatgagcgccatcgatgtggccgcgcgtatccagattctcgataccttcgccgccatccgtgaaacacgtcgtgaaacagcattgatcatggtgtcccacgacctcggcgtggtgcagcatatcgccgatcggattctcgtgctccacgatggtcgcgtcgaagaagaaggctctaccgccgaagtgctcggcagtccccagtccgactacacccgccaactcatcgaagccgcctcgttgtaactcctcttggctccctcatgaagggacggcggaatcgttgccgactcctcgcgtccaccgtatgaacgcccgcgacacgcagttgtcgcgggctgtgctatggtgtgagacatgcagattatctcatgttgttgtcgctaaccgacgcccctaggcgagcggtcagtgacgcataacttgagatagagcattcaatcgcggcagatttgccgcaagaattcgtggaacctttggcatgggcgcaaccgtgtaacgcgcaagctgtgggacgtatcggattcatcactgaaatactcgaatttcaaagcacaaggccacagtccattcgtctgggaacgtcggttcacgaacgcaacgcagcaaaccccaaccccagcaacaaaggacttcagatgaccatccacaacagcctcgccgaactcatcggcaacaccccgctcgtcaagctgaaccacatcccgcagacggccggcgtcaaggccactatcgccgtcaaagtcgaatacttcaaccccggtggctcatccaaggaccgcatcgccgagcgcatcatcgacgccgccgaaaagtccggcgagctgaaacccggcggcgtgatcgtggagccgacctctggcaacaccggcgtcggtctggcactggtcgcccagcagcgcggctaccgtacgatcttcactttgccggacaaggtctccgaatccaagcgtgcggtgctgcgcgcctacggtgccgaagtcatcgtcacgccgaccgatgccggccccgacgacccgcgctcctactaccaggtcgccgaacgactggccaacaccattcccggcggtttccgcccgaaccagtacgacaatccgaacggtccgctgagccactactacaccaccggaccggaagtttgggaggccgctgatcacaaggtcacgcatttcgtagccggcatcggcaccggcggcaccatctccggcaccggcaagtatctgaaagaagtctccgacggcgcggtcaaggtcatcggctccgacccggaaggctccatctactccgccgcctcgcgtgaggaagtccaccagtacgacatcgagggcgtgggggaggacttctaccccaaggctttcgaccggaacatcaccgatgacatcgtgcgcgtcggcgacgccgaagctttcgaaatgacccgccggttggccggcgaggaggggctgctggtcggcggctcgtccggcatggccgtggccagtgccatcaagtacgcgctcgccaacgatctggacgaaaaccagatcgtggtggtgctcgcccccgattccggccgtagctatctcgaaaagatcttcgatgacgactggatgcgcgccaacggttacggcgacgtggtcgaccgcaccaccaagccgtcccttgccgagcagtacctctaaacgctaagtgctcccctcagtcgcttccgcgacagctcccctcggagaggggagccaaaaagggctctggcgcccctctttgaggggagctgtcagccgaaggctgactgagaggagccagcccgcaaagatccaataactttccaaacccgtccaatacccaaccaaacaccaaaggaaaccaacaccatgtccgctgaatacaacgccaagttcgccaacaccgccgtcgccacccgcgccatccacgccggccaggagcctgaccccaccaccggtgctgtggttacgccgatctacgccacttccaccttcaagcaggacggcgtgctcggcctgcgcggcggccacgactactcacgctccatcaaccccacccgcaccagttttgacgagcagctcgccgccgtggaaggcgccaagtacgcgctgagcttctcctccggccttgccgccatcgatgtgctgctgcgttccaccatcaagcccggcgacaacatcttgctcggcaacgacgtgtacggcggcacctaccgtctgctctccaaggtgttcgtgccgtggggcgtgggcctcgatgtggtggacatcaccgacaccgccgccgtggaagccgcgctcgccgccaagtcgtacaagtatgtgtgggtcgaaaccccgtccaacccgctgctcaacatcaccgacatcgcagtcacctccgaagtggcccataagtacggcaccaaggtggcagtcgacaataccttcgcttcgcccgccttgcagcacccgctcgatgatggtgccgatgtggtggtctactccaccaccaagtacatcggcggccactccgatgtggtcggcggtgccgtggtgctcaacgatgaggaaacccgtgagcaggtggccttcctgcagaacgcagccggtgccgtgccttccccgttcgattcgttccttgacattcgcggcctgaagactctggatttgcgcgtcaagcgtcacagcgccaacgccctgaaagtggcggaatggctggaatcccagcctgctgacgtgattgagcgcgtctggtatccgggcctcgaatcccacccgggccacgatatcgcggctcgtcagatgcatggcggcttcggcggcgtgctctccgtgcagcttgccggcggtgccgaggctgccaagaagttcgtggactacaccgagatcttcacgctggccgaatcgctcggcggcgtggaaagcctgatcgaggtgcccgccgctatgacccacgcctccgtggccggcaccaccttgcaggtgcccggcaatctggtgcgtatctcggtcggcatcgaaaacgccgatgacctcatcgccgacctcaagcaggctctcgaccgtctgtgacggagacgctgcgagccgttctcggaacgtaacttcggtgattctccatttcaaggggcggatttgcgctatcccggacatctacttccgtttcaaggggctgttgcccaagtagacaaggcgtgaaaacggcggaatggcgttgggataatgtcatttgtatatgtggtttagctgatgaccagccccttgaaacggaagtagatgtccccgaaacgtccaatccgccccttgaaaccgatttacggataattgaacaggcatacatgacttgtgaccgcggcagtgcggtatggttgggaagcatgacggcacatgaggcggcgctgggggcgctcaagcaatacttcggttacgattcgttccggccaggccagcaaggcatcgtcgatgctttgctggatggccgggacgtactgggcgttatgcccaccggtgccggcaaatccgtgtgctaccagattcccgccgcgctgatgcccggtgttaccatcgtgatctcgccgctgatctccctcatgcgtgatcaggtcgatgccctgaacgatctgggcttgccggccgcatttgtcaacaccacccaaaccccggatgagcaggccatggtgttcgcccaggctgcggcgggtcagctcaaactgctgtacgtggctccggaacgattggaaaccggccgattccgcgacttcgccgcccgcacgccaatctccctgattgccgtggacgaggcacactgcgtctcccaatgggggcaggatttccgttcgtcataccttggtattggcgacttcattgtcggcctgcccaagcgcccgccggtcggcgcattcaccgccaccgccaccgagcgcgtgcgccgcgacatcgtgggattgctgggtttgcggaatcctgccgtcaccgtcaccggattcgaccggccgaacctgtatttcgacgtggtcaagctggaaaccaaatacaaggccgcgtgggtggcgaactatgtggctgcccacccggacgaatccggcatcatctactgtgccacccgcaagaccaccgaggcgctcgcagctacgctgaaccagatggggcacgcggcggtcgcctaccatggcggcatgtcgtcggacgcgcgtgaagcggcgcagcacgacttcatcaccgacaaggtgccggtggtcgtggccaccaatgcgttcggcatgggcatcgacaagtccgatgtgcgatacgtcatccaccacaacttgccggaatccatcgaggcctattatcaggaggccggccgcgccggacgtgacggcgagcccagccgctgcacgctgctgtggaacgaatcggatatcgtgacccggcgccggctactcgacagcgattatgagaacgagcgcatgacccctgaagatcaggaaatcgtgcggcagtccaaacgacgcctgctggatggcatggtgggctattgccgcaccgccgattgtctgcaccggtacatgacgcggtatttcggacaggaaatcacgccgacggatgcgccctcggatacgcatgagggcaagtgtggtgcctgctcgaactgcgaaagtactttcgagaccatcgacgtcaccagcgttgcccaggcgatcagccggtgcgtgcatgatgtgaatcagcgggtcggttccggcaaaatcgtcaagattctacgcggctccaaagcgcaggacctggcatggctcaatccggaacagatgcctacgtttggcatgctcaaggatgtgaacgaggctcgcgtgcgcgatgtgctgagtcagatggccaccgatggctacctattcatcgccgaagggcgtatgccgattgtcatgtttggcgcgcgtgctgctgaaaccgccgcgtcggatttccattatgaaatcaaacgtgtggagcgtaagtcggcttcgataagtagtcgacatggggcagtggccagcgaatcagccagtgcttccgctgcaatggaatcctatattcctgacgatgacgaggaggcgctgttccagaagctgcgcgaactgcgtcgcaccatcgcccaggaaatcggcaaaccgccgtacatcgtcttttccgacaagacattgcgagacatggcccgtatcaagccgattaccaatgcgcagtttttggctgtcaacggtgtgggccagcacaagctcgacctttacggcaagcgctttatggaagccgtcgcctcgtttaacgccgggaatgcgcaataaccattgcctatagcgaatcatggggtatttccgtgtattcccgtgtgggcgcgactacgcttgctaagcgatacggcatgtgaacatgcaaatgtgtagaaaggaagccgagcatggcagaggaaaaggctgagaagcccatcgttgaatcattccagctggatcacaccaaggtcaaggcgccgtacgtgcgttacattgacacggaaacgggtcctcacggcgacgtgatctccaactatgatcttcgtctgacccagccgaacaagcaggcgattcccaccggcggcctgcacaccatcgagcacactatcgccgtgttgctgcgtgagcgcatccccggctacatcgactgctcgccgttcggctgccgcaccggctttcacttgctgacctggggtacgcactccactgaggatgtggccaaggcgctcaaggaatcgctggaattcatcgcctacaaggccacgtgggatgatgttcccgctaccaccgagaagagctgcggcaactaccgcgaccacagcctgttcaccgccaaggaatgggccaagcagattctcgaggaaggcatcagctccgacccgtttgagcgcaaggtcgtctgacctgattaggtgttatacgaacccctgtccgccatgtaacgcggacgggggttcttgtgcctatggcatggtaggtttaccgtcagttcctgtactggtgattgccctatgagagaggtgggaatggctcagccgaacgctgcgaacaaggcgacgtctcgtcgtttccgccacgccaccatgcgtgatttgccgcatatgcagaagatttacgcgcgtgcccgtgagctgatggcggccaatggcaatcccacccaatggggcaatgagttcccccgtgaatccgtgattgaagacgatattgccaaccagcgcacagtgctgctggtggacacctgcaacggccatgagcgtattctggctcagttcgcattgtgccctggtgaggatcccacttacgcccacatcgatggggcttggctggataatgatacctatgtgaccattcaccgcatcgcatcatccggtctggtccggcatgcggcccgtgactgcatcaagtgggctctgaagcattatggcaacgtccgggctgatactcaccccaacaacaaggctatgcagcatgtgctggagagttccggcttcgcccgatgcggcctgattcaattgattgatcgcccggtggacaccaccagaatcgcctatcagcgccacgagtggtaacaaaattggcccccgaaggggccaatcataatcacttagtgaatcgcttactgacttcagtccttggcggcagccgtagcctcagccttggctttgtcttccagcccaagcttggagcgcttgcggctgtagccgaagtagactaccaggcccaaaccgaaccagacggcgaaacgcacccaggtctcccagttgaggccggcgatgagaatgaagcagaacacgatggccagaatcggcgtgaccggtacacccggggcgcggaagccgcggtgcgcgtccggctgggtcttgcgcatccacagaataccggccgacacgatgatgaacgcggacagggtgccgatgttcaccagctcgaacagcacgttgatgttgatgaagccgccggcgaacgcggtcagcagaccgaagaaccacgtgcccttgaacggggtacggtacttctcgtgcacgtggccgaagaactccgggaacaggccgtcgcggctcatggcgtagcagatgcgggactggccgtacagctgcacgagcatcaccgtggtcatgccgatcagcgcgccgaggttcacgatcaccgcgagccagttcatgccggtttccaggatcacgccggcgaccggggcgtcgatgtacttggcgaactccttgtacggcaccacaccggtcatgatcatggtcatgatgacgtagagcacagtggagatggccagcgagagcaggataccgcgcggcagcgtcttgttcgggttgacggtctcctcggcggaggaggagacggcgtcgaagccgatgaagctgaagaacacgatcgacgcggccggcacgatgccgtacggctgggtggagccgggctggaacgtgtagatgccatacggggagaacggctgccagttggacggcttgacataccacacggcgcacacgatgaacagcacgatgatggcaagcttgataagcaccatcacgtcattggtgcgcttggtctgattgatgccgatggacagcacccacgtgatgatcagcacgatgacgaagccgggcaggttgaagtaggtggtgacgcccggcgtggtgccgtaggcggcggtcagttcgaccggcaaatgcaggccgaagccttccagcagcttgttgaagtagcccgaccagccggcggacacggtggccgcctgcagggcgtactccagaatcaggtcccagccgatgacgaaggcgatgagctcgccgaacgccagataggcataggagtaggccgagccggaaaccggcgccatggcggcgaactcggcgtagcacaggccggcaaaaccgcagcagacggcggccagcaggaacgatacggacaaggccgggccggcggtcagcgcgcccttaccggtgagcacgaagataccagtgccgatgatcgcgccgatgccaagcatcgtcagatcgaaggtgcgcatcgtgcgcttcaggggagtggattcggcgacaagctgatccacgcttttcttacgaaacagatccatgttcttctctcatgaaatctaggattatggggctgaaccggacggatttccgggatcccggcacgcctcaacgccgggaatcaaaggcggtttcttatacaaaaccgcatatcggtcattagtgtacgactgccacgcgaaaacagacgatttcgccaatacgtcacattcctgcgcaacaataggtgcctatgagcatgaacgcagcacctgaaatcgcattctcgtccgagcagggcaaggccaactatgcggccgcccgccgccaataccccgcacaggccatcgtgaacctcaaaaccatgcgtgacaacatggcccatttggtctccgtggtcggcggtccgaactccggcaccgcggtgatgggcgtggtcaaggccgatgcctacggccacggcctgctgccttctgcgctggcagcgctcgccggcggtgccacctggctcggcactgcgcaatcacacgaagctctgctgttacgcaaactcggcatcggccccgaccgctgccacattctgacctgggtttacaacggcaccgaagtcccgtttgacgagctgattgctgccgacatcgacgtgtccgtcggctccctgccgggtatcgatgccgtggccgccgccgcgcgcaaactcggcaagcccgctcgcgtgcacgttaaggtcgattccggctttggccgcaacggcttcacgcctgcagggttcgccgccgcgcttgccgagttggtgccacttgccaaggaaggcgtgttgcatatcgtcggccagtggagtcaccttgccgtggccgattcgcctgacgtgcctgagttcgtggcctccaccgaccgccagatcgaaacgtttaaggacttcaccgcacgtatggaaaaggccggaattccgccggagattcgtcatctggccaacactgcggccactctggatcgcccggaaattcatttcgagctcacccgccctggcatcgggctatacggctacgagcctgatccggccatgggcaccccgcgcgattggcatctgaccccggccatgcgcctgcaggcgcagctcggcacggtcaaggatgtggaggccggccatggcatctcctacggccgcacgtacctgactccagacaacacgtccactgccatcgtgccattgggctacgccgacggcatccaccgctccgcctccggattcgatatggaaggtgccaagcatgtggagaagccgggcgggccagtgcgcattatgaccaccgagggcccgaagctctaccgcgtctgcggccgcgtgtgcatggaccagttcatcgtggatttgcacggttccgccgccgaactcggagttcacgagggcgacacggtcgaactgttcggcccgggtcgtggtgagcagtttgtggagcccactgccgacgactgggcccgtgccgccgataccattagctatgaggtcttcacttgcctgcgcaatcgcattccgcgtctctacgagcacgccgccgaggtgctgcccgctgacgacctcgccaagctcgatccagccacgctgctgtaacactgtacggcagccgatatatgggcctatgcttggactatggaaacaacgcaagatggggaacgggtgctgagcgatgagggctacagtgcctttgatgaagagcgttgggcacctgaaccgccgaagtccaaggcccgtaccgcttttgagcgtgaccgcgcaaggctgatacattcgtccgccctgcggcgtctcggcgcgaaaagccagattctgattgctggtaccgatgatttcgctcgcacccgcctcacccacacgctggaagtcgcccaaatcggtcgacaaataggcgcaatgcttggctgcgatcctgatgtggtcgactgcgcttgcctggcccatgatcttggccatccgccgttcgggcacaacggggagcgggcgctcgccgaaatcgcgcgcaatattggcggattcgagggtaacgcgcagaccatgcgcattctgacccgtctcgaacccaaaatcttccatccggacggccgttccgccggtgtgaacctgacccgtgcagctcttgatgcagcggtcaaatatccgtggactttggctgaggccgaccagcatcccaagggggagcggtccaagaagttctgcgtctacccggatgatgagcccgtgttccgatggttgaaaatcggcgcacctgtggctaccaagccgatggaatgccagatcatggatctttcggatgacatcgcctattcggtgcatgatgttgaggattccatcgccactggtgccttcgacccgattgtgctcgccgattcacagattttggaccacatcatcgagcagacgcgcgactggtatgggaccaagtgggatgcggataagctgttggcagcattcatgagactcaggcgtgagcatatgttccctgcgcatttcaacggatcacgtcaagctttggcgcagttgaagaacatcacctccgacttgattgggcggttttgctggtcggtggaaaccgccactcgcgatacgtacggaccgggaccgttgacgcgttactccgccaatatcgtgattcccgaggatacgaattacgagattgtggcattaaaaggcatcgccgtgtatttcgtcatggcgccgcgtgagagggagccgttccaccaggaggaactgaaaatcgtcgaggacctgatcgacgtgctgatggccgattcaccgcagccctccgacgcgctggaaagccagttcctggccgattggaatgagtccaccaacgacaatgaacgtttgcgcgtggccatcgatcaagtggcgtccctaaccgacaattccgccttggctctccattccatcctgtgctgaggctgttccgtggcgggcaccctcagtcagttgcgctgacagctttcctccctgagagagctatgacctatcccttggcttcccccgggtgaggagagctgcctccataggcgagtgaggggagccaagaaagtaacggtacatatctaccgtgtctcacacgtggcgctactctagagacttatggtcggaatgattaagaaagaagatgtcgagaaggtgcgcgccgccgcggacctgtacgacatcgtatccgcgaccgtaacgcttaagccttccggcactggcacattcgtcggcctgtgcccgttccacgacgagaaaaccggcagcttcaacgtgcgcccttcgctcggtgtgtggcactgcttcggttgcggtttgggcggcgacgtgttcaaatacgtcgaacaatccgagaacatcgacttccgtgaagccgtggaactactcgccgacaagtaccacatcgagctgcactacgagaacagcggcaacgggccgaaccgcgaaaacgccggctccaagcgcacccgactgctggaagcctgcgaggaagcccagcgtttcttcgtctcccaaatcctgaccaaggaggcattgcccgcccgcaaactgctcggcggtcgcaacttctcccaagccgactgcgaacgtttcggctgcggctacgcgccccaaggctgggataatctcgtgcgtcatttggcatccaaggggtttacacagaaggagatcttcgacgccggcctggcccgccaaggccagcgtggcatctacgactatttccgcggccgcgtgacctggcccatccgcgattcgaccggacgcacgctcggcttcggcgcgcgcaaactgtatgaggacgaccagatcgccgccaaatacatcaacacgccggatacgcagctttaccgtaagacccaggtgctctacggaatcgatttggccaaatccgccatcgtcaagaagcggcaggtggtaatcgtcgaaggctatacggacgtgatggccatgcatctggccggcattgacaccgccattgctacgtgtggtaccgcattcggtgccgaacatgccaagatcgtacgccgccttattgccgacgattcgctgggtgcggtgcaattggtcggtccgctgaagatcaaagaccagccattgagttcacgtatcgtattcacgttcgatggcgatgccgctggccagaaagccgcactgcacgcctttggtctcgattcggcattcctttcccagacctttgtggctgtggccgacaacaatcttgacccctgcgatctgcgtatcgaacgaggcaatgaggcggtgcgctcgttgattgccaatgccaagccgctctatgacttcgtgatcgatgccgccatcggccggtttgacttaacgtatactcccggtcaagtgggggcaatgaaagccgtagctccgctggtggcacagattcgcgaccgttccctgtgggatgcctatgcgcgcaaggctgctggccgtatcggcgtggatctcgaggtgatgcgccgcgaggtgatggcggcccgccgtcagatgcacgtgcgcgacgaggacgcctatgcgcccaagcgccggttcgaccgtgaggagcgtcgggtggaacccggcactaatccatatgccaatccggccgcccgcaagactctggagcgtcgcgatgccgccgagcaggcatacttcaagattgatgatgccgtgttcatcgccgagcaacagttcatggccacactgattcaggtgccgcgcgccatcgaccgtaccatgttcggccagctgaccatcgaccatttcatgacttcggtgttccgcaccctgtttcaggtgattgcggccgccggcggactgccatccgacaacaccccgcagggtctgtggatgcacaacctcaccaaggccggcgggcctatgttgaatcaggtcatcaacgagctggccgtcatgccgctgcctttgcccggagatgacagcggcaacggtgcgcaacccgtgcagccgaacgcgcccggtggcgctggtgcgcctggtgccgccgccatgcagctacgacccgccactgcggaggagcagcgatacgccaccgaactgctcacccgactattggacatgggcttcatgcgccagatcggtctagccaaacgccgcatggcccaactgcccgacggcgaagagaaaatcaccctccttggccaaatcacccgcatggaaaccgcccgcaaagacctccaagcccaaatctatggcaacaccgtcggctaatacctcccactgattgcgcgtatcttcgaatacgtgccggatgcataaggccatacaaccggttgccggattggatgggtgcagaagttgcggattggccccatccaaattggactggtttgggtggggccaatccgatccgttcaataatgaagcgcgataccaagcagcgtcgaaacgaagggaaactcatgacgcagaatcgtgcggaactcaaccgtaatctggcccaaatgctcaagggcggagtgatcatggacgtcaccacgcccgaacaggcgaaaatcgcgcaggatgccggcgcgtgcgcggtgatggcgctggagcgcatccccgctgatattcgcgccgccggcggtgtctcccgtatgagcgacccggccatgatcaagggcattcaggaagccgtctcgattccggtcatggccaaggtgcgcatcggccacatcgccgaggcccgcattctgcaggccatcgaaatcgattacatcgacgaatccgaggtgctttccccggccgacgacgtgtaccacatcgacaagaaccagttcgacgtgccgtttgtgtgcggcgcgaagaacctgggcgaggcgctgcgccgcatcgccgagggtgctgccatgattcgcaccaagggcgagcctggcacaggtgacgtgattcaggccgtacgccacatgcgcaccatgaacaagcagattcgcgagctcgtcggtctgcgcgacgacgaggtctacgaggccgccaagcagctggccgtgccctacgacctggccaagtacgtgcatgacaacggccgcctgcccgtcgtgaacttcgccgccggtggcgtggccactccggccgatgccgccctgatgatggagctcggcgccgaaggcgtgttcgtgggctctggcatcttcaagtccggcgacccggccaagcgcgccgccgccatcgtcaaggccaccgccaactggcaggacgccgacctgctcgccaagctgtccgaaaacctaggcgaagccatggtcggtatcaacgaggacgagattcagaccatcatggccgctcgcggcgagtgacgggagccgaagccggagaggacaacatggttgtagctgttgaatacatttccaaagaagaatccgcagacgccggaaccgccacgcacggcgtgaccggtattctggccgtgcagggcgcgttcgccgaacatgcggcggtgctcgacaagctcggcgccccgtggaagctgttgcgcgcggccgaggatttcgatgaatccatcgaccgggtcatcctgcctggcggcgaatccaccgcgcaaggcaaactcctgcgttccaccggcctgttcgagccgtttgccgcgcacatcaaggccggcaaaccggtgcttggaacctgcgctggcatgattctgctggccaagaagctcgacaatgatgagaacgtctacttcggcgcgctcgacgccgtcgtacgccgcaatgcttacggccgccagctcggcagcttccaagccatcgctgatttcggccaagccgacgacccacagcgcatcgcggactttccactggtgttcatccgtggaccctacgtggtgtcggtcggccctgaggctacggtcgaaaccgaagtcgatggtcacgtggtgggcctgcgccaaggcaacatcctcgccaccgccttccatcccgaactcacggacgacatccgcatccacgagctcttcctgtcgctgtagccgatccgtctgccgttagactggtattcgaccgacgagtcaaggagacgatctgccatgcagttcacgctgaaccggcgcagcacggtgccgatgtaccggcagctggctgctgagctgcgtgaacagattgtctccggcgcaatggctgagggctatcgtttgccgcctgaacgcgagttagcctcacgcctcgaggtcaatcgcaccacggtattacaggcctatcagcaactcaaagatgagggactcatcgcctccaaagtaggcaaaggcacgttcgtgctgccgttgcagcatactgagactgcccggattcctgtagcgagacataagccgattgacgaggagccgaaaccgagcgttgtgcggccgccgtggtcggtgttgttctccgactattccaaccgattcacctaccacgacattgcctcggctgagcgggcgcaacgcggcgataccatcatcgactttgccaccggctcgcctaatccggcggatattcccgacgatttgttgcgttcagtgagcattgaagcgttcgaatcgcgcgaattcgacggtcagccagaatcgcctatcgaaggattcgatgaactccgcgcattacttgccgagcatatgagcacacgcggcgtgcagtgcgatgtacgaaacgtgatggtgctttccggttccgagcaaggcatcgatcttatcgtgcgcgcattcgtcaatcctggtgactgcgtactggtcgaacaatccacgttcttccccgcattgcaaacgttccgctcggccgatgctcgcatcatcggcgtgccggtcgatgaacacggcatgcgcaccgacctgctggaaggctattgcgcgcgattccgccccaaactcatctacacagttcccacgttccaaaaccccaccggcaccacgctgccgcccgaacgccgcagtgaactcatcgacgtggcacgacgctaccagtgcctaatcgtggaggacgacgcctacggcgacctgtggtatggcgggaagtcatccgattcgcatcgccccataccgctcaagggcatggagaacgcgggatacgtgatgtacttgtccacgttctcgaagactgttacgtcgggcctgcgcacagggtggattgtggccgacccgcacgtcatcaaccgcctggcggctctacgccgcatggtcgaccagcatacgagcacgtcatcgcagcgtatttgcttggagctgcttaaggaaggtcgcatcgccgagcatattcaaacgctgactgattcctatcggcggcggcgagacaccgcaatcgcggcattgcaacgattcgccccagatggcgtgcgttggactgtgccggccggaggctattacatctggctatccctgacggagggcgtacgctcgcttgacgtgctggaatcctgccgttcacaaggcgtcacattcatgccgggcagtgtgttcgatgttgacgaaatggatgattcccatatccgtctcaacttcgtgcgcccggatgccgccgatatcaccgacggcatccgagtcatctgcgaagcattagagcgggcgattcaggccagctgagcgacgagactacgtaccttatgccaatctgtgcgtagaatagaacaggtgcggtaacgggaatgttcatggaggaatgaatgcggcgttggctggtcaatgtggccaaaaatgaaacgattcttgtcgttgccgcaatacttgcactgatttcgtgttttgtagtacctccggatgatgaatacaccatgtacatccatgccagcaccatcagccagttgatttgcctgatgattgtagtctgcggatttcagcgcatcggcatcttccgcatcattggctcccgtctgctgcaacgtacttccaccatgcgcgggctggtgcttaccttggtggcattgacgttcttctccgcgatgctcatcaccaacgatgtcgccctggtcacgttcgtgccattcgctattgcggtgcttatcatggcgggccaagaggataagaccatactggtggccacgctgatgaccatcggcgcgaatgtgggcagtatgctgacgccggtcggcaacgcgcacaatctgtacctcaaagcgctcaccgaaatgtcgacgaagcgatttatcagcatcatggcgccgtattccttcaccgcagcgatactgctggtcattgtgatatccgtggtgttcggcagcaaaccagtgggcgatttgggcgatctcgaaaccggtgtgctcgctcccgaacgcagcaaacatcagcccgatgagatccgcatcaccggttacggcgccggttacggcggctggcgcacggtcatctattcactgctgttcatcgtctgtctgctggctgtttccggcaccatcccgttatgggccatgtgcgtgattgtggtcgtatcgttcctgttcaccgaccgccgcgtgttcaaatatgtggactggggactgccgctgaccttctgcatgttcttcattttcatcggtaacatgcgccgtgtgcctgaattctatgagctggcacgcaccctggtcggttcccatccgttggaagtggcggtggcgtccagccaggtaatcagcaatgtgcctaccaccattctgctgtccagcttctgcaatcaatggcgggcgctgatcatcggcaccaatctgggtggtatgggcacgcttatcgcatccatggcctcgctggtggcttataagaacgtcacgcgccaatacccggataagaaggggcgttacctcgccgtctattcgtcggtgaacgtgctgttcttggtggtgctgctgaccttgagctggattatcgaatagagcctatcgggcatacacggtgggagagccggacatcctgctcatggctgaaaccgggatgttgtgaacctggctgatggccgcgtccagagtggaagtcgcggaagtcgctgacgtcataggggatgagttgacggctttggccatcgggtgctgataggagttggagttgcgagccagacgcgccaatgcaggacgctgcctgcggaacagattcataaacatgccgcacactccttcatcgttggccgacggtctggtgaccgtcgtgatttccatcatggctgcccatatcggcatccgctatgggggatatcccccattattcccttatttcacacaatttcccctcatccttaagggtgattctttcgaaaatgtgcggggaaagcatgcgatagcgggcacgcgagaatctgcatgcccgatgaagcggtgtattaccgtgaagtgaccagcgtaacgctatatggttcaatcttcatcgcgaacaatgacgacggtgtggtcgtcggtgttactgctggattctacggtgatgcgcaatttgccgtaatcggtggttttcccgctgactttggtgacgaatcgataccagccttccgtggtcacgatgatggagccagaggggacgcggggcggtgatacgtacgtaacggctgttggcgtgcaccggtggttcggggcaatcggtggtcattctctggccatgtgccccacggatttcggtgccatagctgacggccgagcaattggtgaaatcccagaatcgcagtgggtctgcttgggtgcgccagcggtcagagcctgcggcgcgccaagtgtggtgatcgaggtagacgccgtcgaaactatagttgttcaccatgttggcgttcaatccaccgtctgcgctgtggttgatgtcctcgaagaacacgccgtacagtcgttcgctcacttgatgggtggagctccccaccgaaatccgcaccataactcaatcttacgtgtctgatgtgcgaaatgcggcggaagagttcaggcacagttcatattccggtcagtccttaatgccaaatcgccgttatacggccggtacgctcgaaaacagaggttaacgttagaagacgggagtattgctgtgcagtcctcggtgggaatactcgagcgcatcgaccatgtgtatccgtcgttgcgcccggcggagcgcgccgtggcacagtacattcgtgagcatgccgaagaagccgccgatctgactgtcggccagatggcggatatcgcccatgtcagccagcccgcggtaatccggtttgcccgcaagctcggcttcggcggataccgtgaactgcgctatgtattgcggcatccggccgccgaacatcaggtgacgttcgacccactgtccgggttcgatttgaatccatgggacaatgtggaggagattcccgccaaggccgccgaaggtgcgaaaacgctcattggcgagatgtgtgatgccttggatgtcaaggcttaccgtaaagcaatcgcgctgattgccgaagccggttttattgatattttcggtgtggagaattcgctgacgcctgcgaccgatctgttcaccaagctcggctatttgggactcacttgccgtctcagcaccgatgcttacatgcagcagatcggcgccgggcatatgcgccatggcgatgttgccatagcgttctctcactccggaagttcgtcggatacggtcaaggcgctgcgattggcaaaatcgcatggcgcaaaaaccattgcgattaccaatgccgtaggcgtgcctttggccagttgggccgatgtggtgttgctgaccggacgtggttcgcgcgcgatctatggcaatgccattttctcctgcgtggcagatgccgcgcttgtggatatgctctacatgggagtgattttgtctaattacggccgtttctccgcggcgctggatgagtcaggccgcatgattcgtgaccgcgtgttcgagggctgagccgttagctctagggcgatataccgcggagcttttacacccctacgattagactgatgcgagtttggccccgtagctcagctggatagagcatgtgacttctaatctcaaggtcgacggttcgagcccgtccggggtcacgaaaaagcccttggaatcgtaatgattccaagggctttatgtattagcgagcttcgagattactgggtgcacgacagggggttataggaactaaacgtggtgttttagactctggtttccttggtcctgaggtggcctatgagggctcttatgtcaaatgccgggctccggtcagcacggccgcgacttcgcgtggcgaggttgttgcccgtccatcgcgtgggcctcgatcgatccggtggccgcgtcgccgagattatggatggccttggcggaggcaacgagggcgtcgaaggcgtcgggaatcagagacgggtctccacggagtgcatccgcgacggcgagggtgatcaggacggccgcgcgggccaggcccgcggtgagtgcgaaatatcgtttcatgcgcgggggtatgcgtcacgtccgagggaggcgtctcgcggatggcgctattccgccgaacacgccgtgtgagcgggcggcatgccgcgctaatcacccgatccccaggggacgtgggcgtggaattcgtcccaggcgatgccggtgccgtattccgggaccccgacgccgacgtcgtcggcgcttccggccgtggatgccctcgccggcttccgttgttcgggacggatgagcgacgatggcttcggattgcggcttttcatgtagcacatccattcgcaggcgcgtctcatgtgctcctcgggcaggccccgatggttgaggagcatgcgtttgagcggcgagttgacgccgccctccaatcggttcgtggtgcgcgccaccgggccgacggcggtcagtgacgggtcgaggaacgcgaacagcctgccctcgcggaacagcttttccagtcgccgatagcagcggcgcagctcctggtgggtccaccaccattcctgtttggatgccttcgggttcgcggggtcgtccctcgcataggtgcgttcggcgatgaagtccctccaccggatgtgccacgcgttgagcgcctcgccccaccgggccgccgcctccgtatcacgcacggcggtcagcttgtcggagagtttcttgagttccctgccggcctcgagcctcggccgcgaggtcaggtcggtcctcgtgttgcgctgcacgtgcaccagacagcgctggatcctcgtgtccggccacgtctcccggcatgcgctctcggcgccgcgcagcccgtcggtgatcagcacgtccggcgcggggatgcgcgaaaacagcgccatataggcggccttcgactcgttcgagcaccactggatgcccagcacctcgccgctttcgccgtcgatggcgacgatcaggcaccaatcgtggttcatgtacgtgccgtccgccatcaccgtgtgatgtctcgccgagcacggcgggatctcgggccggatgccccagcaccattgcacgcgtttgcggaacatgcgcgagcccgtccccatgtcggcctgcctcctgccggaaagcagccatccgaggaagacgcgcaggtcggcgtcgagtctctcgtcgggtctcggaacggtggccccaagcgaacaggccacgcatttccaacgctgggagccggccctcgtcctgccgttcttcctcatcgccccgccgcagaccggacacaaccgcgcccttttcgatttcgtcctcatgcgcccatggaacaggcaaagaacggcagaatcacggatctttaatacgacgtcacattaaagccaccccaacacgcctactcccgcaaggccaaacccggaacataaacaccacgtttagttcctataacccacgacaggacaacgaaccgggaaacgatggaatcggcaaagacgggagatcctgatgcagagcatatggcagacaatcacggcaccgcccgtgaccataccgttctcgctcatgtggctatgcgtgttcgcactcgaactgatcatgctgccggaacgtatacgattggccagatatggcggctactggtacatgtgcccctacgactaccggaccacgcagatggtgtcaggacgcaggatatggcaccggttcgcatcggcggccgtcgcggcgacgtggatgtggtacacggccatggaacacagtccctctactgacaatccggactcgtcgctgggcagagtcttcggatcgtacaggaacacggtccagttcgattgttccgtcatgacacatcacggcacacgcaatctccgatatcggtcgggttttcgatggtccggcctccatagcgtaaggaataatcttggcggacgtgtgcggcgggcgggaacacctcatcgaaccggttcgcaatccttcgtccgatatcgtcgaaatcatcgaaataaattggcgggcttggaagccagtccgtatgatgttgagctgtcgacgacaccgaagatgacgccgacgatttccgaaaagggacccataggaggagacaatgaggttttccaagacggccacggccgtgatcgccatgatcgccatgatcgcccccacggcggcatgcggcaccgacaacgcatcctcggacggcaagaccgagatcaccgtatgggcgtgggacaacaatctcaaggccaatgcgaaacagttcatgaaggacaatccggacatcaaggtcacgttcgccaacgccggcagcagcaaggacgagtacgtggccctgtccaacgcgatcgaggcgggcagcggagcccccgacatcgcgcagatcgaatactatgccatccccgaatacgccatcaaaggcgcgttgaaggacctcaccgacaacggggccggcaagttcaaggacttctacacgccgggcacgtggagttcggtcaactacgcgggcggcatctacgggctgcccatggactccggccccatggcgttcttctacgacaaggaggtcttcgacaaggccggcatcgacgaaccgcccgccacatgggacgagttttacgaggacgccaagaagatccgcgcggtcggatcctacatcaccaacgaccccggcgacgccggattcttcaacgccatggtctggcaggccggaggccacccctactccacgtccaaggacggcaagaccgtgaccgtgaacctcaccggggaccccggcgtgaggaaattcaccaagctctggcagaagatgatcgacgaggacctcatcgaaacgaagaccaagggcaccagcgacgactggtaccgcgccgtcggctccggcgagttcgccggcgtgatcaccgccgcatgggcgcccggcatgttcctcaaccaggcgtccgaaggcgccggcaagtggcgcatcgcccagatgcccgcatggtcggccggcggacacgaggtctccgagaacggcggcagctccctcgcgatcctctcctcgtccaagaaggccgacgccgcgtacaagttcatggcgtacgcgctccacaacaaggacgcggtcatgtccagggtcgaccagggaggcttccccgccgacctcgaatccatgaagaacgacaagttcctcaaccagaccaccatggtcaacaccaaaggcgagaccgtcgaatacttcggcggccagaaattcaacgccgtgttcgccgaggccgccaagaacgtggtcaccggattcgaattcctcccgtacgacgtgtacgctcgcagcatcttcaccgacaccgtgggcgcggcctacatgggccagggcacgctgatggacggcgtcaaggcatggcaggccaagctcgtcgagcagggcaggagccagggcttcaccgtcaaggaaggataggaacgcaagacatggtcggaatcaaggacgtggcgggcaaggccggcgtgtcgatcagcaccgtctcgtacgtgatgtcggggaaacgacccatctccccggccacgagacgcagggtcctcgccgcggcgagggagatcggctacgtgcccgagcccggagaacacgccgcccgcgcgacgaggacccacttcgtggccctgagctcgcccgtccacgattcgaccagctacacgaactacttcgcctacttccttcacttcctcagacaggcgcgattccacggctacgaaaccctcctgctgaccgaggaaaacggcggggagcaactcgcacggctcatcgacaccggactcgtggacggggtcgtgctcatggacgtcaacatggatgacagccgtctcgccgtggccgccgccacgggagtgccgttcgtgtcgatcggactgcccggcgcggacacaggcatcccgtgcgtcgacatcgacttcaccctcatgggcggcggcatcatcgaccggctcgaccggctcggacactcccgcatcatgttcatcggcggcaaacacgtcgactacgaacgcggcgggggagcgaactacctggtccgcctgcggtccgccctcctcgacaacgcgcgacgccggaacatccgggtcgacgaacaatacaccgacgaggacgacttcgacgccatcgaaaccatcctcgacatggccatgctcaatggggacaccgcgatcgtgtcccaaggcggccccatgttcctcaacagcctcgtcgccgtggcccgcaagaacggaatccgcttccccgcggacctgtccgtgatctccgcgggaaccttcaccgacccgatcggcaggcggctgcgcatcgacgaatacccgctcctgcccgcggacctgtgccgcatgggcgtcgacatgatcgtccgtctcatggacggcgaaccatggcgcggcgatcgcgtcacgctcatcccgcccgtctaccaacgccgcggatcgctcggcgcgccccgcgagcctgaaacccgctccgcgacgacgcccggacccgcatcactcgcggcgacggcaccaccgtggaatacacgacgcgcaggatcgctggaggcatcaccgcctccagctccgacggcagcgaattcacgctccgcgacaactccacaggcgcacccgtacgatcccacaacgaccatgcgatcatcgaacgataacaaaggagccgatgatgacctctttcaaccgtgaacccctgcccgacgccgtccgcacgaatggcgcctccccgaacccgtggtggtcgaacgccgtcgtctaccagatttacccacgttccttccaggacacgaacggcgacggtctcggcgacctgaagggcatcacctcccgcctcgactatcttgccgacctcggcgtggatgtgctgtggctctctccggtctacaggtccccgcaagacgacaacggctacgacatctccgactaccgggacatcgacccgctgttcggcacgctcgacgacatggacgagctgctcgccgaagcgcacaagcgcggcctcaagatcgtgatggacctggtcgtcaaccacacctccgacgagcacgcgtggttcgaggcgtcgaaggacaaggacgacccgcacgccgactggtactggtggcgtcccgcccgccccggccacgagccgggcacgcccggcgccgagccgaaccagtggggctcctacttcggcggctccgcatgggagtacagcccggagcgcggcgagtactacctgcaccagttctcgaagaagcagcctgatctcaactgggagaacccggccgtgcgccgcgcggtgtacgacatgatgaactggtggctcgatcgcggcatcgacggcttccgcatggacgtcatcaccctgatctccaagcgtacggatgcaaacggcaggctgcccggcgagaccggttccgagctccaggacctgccggtgggggaggagggctactccaacccgaacccgttctgcgccgacggtccgcgtcaggacgagttcctcgccgagatgcgccgcgaggtgttcgacgggcgtgacggcttcctcaccgtcggcgaggcccccggcatcaccgccgaacgcaacgagcacatcaccgaccccgccaacggcgagctggatatgctcttcctgttcgaacacatgggcgtcgaccaaacccccgaatcgaaatgggacgacaaaccatggacgccggccgacctcgaaaccaagctcgccgaacaacaggacgccatcgcccgacacggctgggccagcctgttcctcgacaaccacgaccagccgcgtgtcgtctcccgttggggcgacgacaccagcaagaccggccgcatccgctccgccaaggcgctcgcgctgctgctgcacatgcaccgcggcactccgtatgtctaccagggcgaggagctcggcatgaccaatgcgcacttcacctcgctcgaccagtatcgcgacctcgaatccatcaacgcctaccatcaacgcgtcgaggaaaccgggatacggacatcggagaccatgatgcgatccctcgcccgatacggcagggacaacgcgcgcaccccgatgcaatgggacgactccacctacgccggcttcaccatgcccgacgccccggtcgaaccctggatcgccgtcaacccgaaccacacggagatcaacgccgccgacgagatcgacgaccccgattccgtgtactcgttccacaaacggctcatcgccctgcgtcacaccgaccccgtggtcgccgccggcgactaccgacgcgtggaaaccggaaacgaccggatcatcgccttcaccagaaccctcgacgagcgaaccatcctcaccgtcatcaacctctcgcccacacaggccgcaccggccggagaactggaaacgatgcccgacggcacgatcctcatcgccaacacggacgatcccgtaggaaacctgaaaaccacgggaacactcagaccatgggaggcgttcgccatggaaaccgatccggaataaaccggacccaaccgccgccgaaccgacaagagggccccgcgccacgcatgaaccaacaccatgcgcggcacggggccctcacgccgtatcacggctgtcgggtcgatacccgacaccggtcgtgtgaccactgggacaggggataagagccaaggagacgaaccaccatgacgatggattggctgcaatgtattggacggtctcgtgtgggacagggcaacgaaggagatgatcatcacgaccgatcagaatcatccgcgtcattacgaggaggagtccaagcggcagatcgtgcagtcgtacgagaacggcaagctgtcgtcgcggatcagggaggagtacagcatcccgcgctccacgctgcagcgttgggtgcaggggatacgcaacagcggatcaaccaggggataacgtcctataagaaatcgatatatcgaatctgccttccttggctgttccattaggtaataatgtttcttatcgaaaagtgaacattaacaggagagaagattcatggttcgatggaagaagatagccgcgattctggcaccagtcctgctgctttcggcatgcggcagcacccagtcggcatcgtccgccaacgattcgtcagcgggtccaaacgctgtcatcagcgtaaacggcaccgaaccacaggtttccttggtgccgatgaacaccggtgaagtcggcggagaccgcatactcagcgccatcctcgctggtctggtcgcttatgacccgtccggcaagccggtgaatgaagtggccgaaagcatcacaccgaattcggacgcaacccagttcacagtgaagatcaaggacggttggaagttcacggatggtacgccggtcacgtcggagtcgttcaccaaggcctggagctatgcggcgaacgtgaccaacgcccagctgaactcctcgtacttctccatcgtcaagggatacgacgaactgcagaaggaaggcacgccctcagacgctcagctgtcaggactggtcgtcaaggatgaccacacgttccagatcaatctgaacgcgccggactccgcgctgcccagccaattgggttccgtcagcttcctgccagttccggaagcattctataaggatcctaaagcgtatggcgagaagccgattggcaacggtgcctataagctcgtttcctggaagcatggacagggcgcgaaggtcattcgtagtgacgattacaagggcaacttccccgcgaagaacggtggcatcgacttccggttctatacgaccttggactcggcatacgctgatgttcaggccggtaacctcgatcttctggatcagattcccgccacctcctactcttcctatcagaagaataagaatgtgaaagtgttcaccgcggccggttcccagacacagggcatcagcattcccgaacgcctgaagcatttcagcggggaggaaggcatacttcgccgtcaggccatcagcctgtccatcgatcgagacctgatcatcaagaagctcttctatggcacccgtgtcaaggcagttgattattcggcgccttccatcaccggatacaccgataatctgaagaacaagaccatcctcgaatacaatccacagaaggggaaggaactctggaagaaggcggatgccatctccccgtgggatggaacattgagcatcgcctacaacgccgattccagtgacaagcagtggattgaagccgtcttgcatcagttgcaggacaatctgggtgtcgatgtgcagccgcagtcatatccgacaaagaaggagctgcgcaccgccgccgtcgacaagactctgcccactccataccagtcgggttgggccccggactatccgaacatcgaaaactatctgacgctgcgcttcagctccgatggcggatacaacgaatacgactaccacaatgacaatgtcgacaaaattctcgccgaaggttccgcggcccccacgaccgatgatgccaacgccaagtatcaggaagccgaagagattctgctgaacgatttgccgcagattccgttgtggtatcagaacatcacggcagttggttccaaggacattaagaaagctgcgttcacctataacaactatccgatgtatgctgatttggagaaatgatatgcccaccgtctatctggcagggggatgctattggggcgtccagacctactatgaccgggtgcaaggtgtgacaagcacagtcgcgggattcgcacaatcgagaatcccgcgacccacaggggagcagattgcttccggtgaagctggcgccgtggagactgtggccgtcgcctacgattcgcagcaggtctcactgcaaacactggctagattgcatgccctgctcattcaggagactccggccgatgaaaaaacacccatttcagagcatgccggtttctattggactgattcagaacagagggatgcattcgaagccgccattcgtgagcgaaaccttgctgatgtgaccatcgaatggctcactcgatttgaggagtcttccgaggaacaacagcactatctcgcatcccatccgggagccgaatgccatataccgctcgccttactgaacgaggtcgggaaataccagaaggagctctcgatttagagcagtgtcactgcagtcaaatcgcttgtgtccatcgcggccctacaacgattagttattgatgagggcacagccaaggtgtagtcgactgcatgggacatggaaatgctgaaaaacggctctccgggtgtttgtgcgggggtggagtggagccgctggttgtcggaccgccacacgtagtcgttgaggtcgcgcctcagctgctcgatcgtggtgcagtggttccggtacgcgagctccttcttcggcggcctgttcgtgttcgcgcatgatgttgccgatgcgtctgctggacgcggtgacgcccctcctttccggggcggccttgatcttcctggcgccgtagcgttcgcggccgtcgcgtcaggccgcgcgcacgtcgccggcgattggatccgcacgctccgtctcgggatgctcgatcatccagtagtaggtggagcggggaacgcccggtatcccgcactgcgccgatatcgggcagcgggcggcgttggcccgtatcacgcctgccttcgcgcgaataccggcgccgcttgttctgaaacgtccacctccacctccttctcatacccgggaacacccttaagggatgcggcggctgtgcttcagctgtacactggcagcagatgtgccgaaaaacggctgttgccgaaaagtccgccaatggcgacgaacgagggaagaagggcccgtggcgcgagccattatcgaagtgagaaacctgcgcaaagagtatccggtcgaggatgagaccgtggtggcgcttgaccgcgttactttggcgattccgcaaggacagatttgctgtatcttcggcgagtccggttccggcaagtccacgctactcaaccaactcgccggtatggagaagcccacgcgcggcggggtgcgaatcggcggggtgccggtcagcaagctcaatgagcgtgaacttgcggcatttcggcagaagcacatcggttttgtgtttcagtcgtacaacctgttgcccaatttgacggcgctggaaaatgtggcgatgccgttgatgttccgcggagtgccaaaggaacgtcgtgaccgcgtggctcgcagtgtgctcaaacgagtcgggctcgggcatcgactcggccattatccgaggcagatgtccggcggacagcagcagcgtgttggcattgcccgtgcattcgtgaccaagcctgaagtggtattcgccgatgaacccaccggcaatctcgattccaagaccaagaccgaagtcatgaccatgatctgttccttcgctcgcgacttcaaccagaccatcgtgttggtcacccatgacccgcagatggccgcctacgccgatcgcatcgtcacgctgcttgatggacgtatcgtcagcgaccagatcaaccaaggcgtcactgttcaatcgatttcagctcagtccattcagtcggctcaatccgaccagttcgttcaatccattcaacctactgcagtgccgtctgcatccgtgccgtccgtacaaaccgtctaaggagatgcccgatgaaacacctcaccacacgtatgcttgccatcatcgttgccctgcttgcctcgctatccatgatgctcgccatcgtttccctgcctcatctggcatacgccgtaggcgcggatgacggcagcgcgcagggggccgatcagagcgtggctcccacgccggtgtccgggccggtgccgaacatcatcgtcaccaacttcacctacggcggcgattccgtggctgccggtgccaaattcgacttgaacttcaccttccagaacatggggcaggtggccgtcgcgaacatggtggtcacggtggacggcggcgaaagcttcgccattgcgggcggcacgaacaccttctatttcgatgcgctgtgggccggctattcgttgagccagactgtgccgatgcaggcgcttgcctcggccaagagcggtgcccagccggtgactgtcagtttcaggtatgaatatctggactccgacgcacgctcctcgaatcagtccgacgtgaagatagccgtgccaatcagccagcccgatcgcttcgaggttggcgatccggtgccgtcagaccagattgtggccggtcaggagaccacggtcacgctggaatatgtgaacaagggcaagggcgacatcgccaacgttgaggccacgatggagggagagggttttgacgcgacgatgaagacccagtatgtgggcaatgtggcttccggggccaccggctctattggctatgccttcactcccaccgcttccggtgaactcaacgccacactcaaagtgtcctatgaggattccgatggacagagcaaaaccaaagagttcccagtcaaactctcggtggctgatgcggcgccgatggatgatccaagcagggtcgattccgatatgaatcagaatgtcagccagggtttgccatggtgggtatgggcggcagcggcagccgttgcggttgcggtaatcgtaggtatcgttctgctggtgcgtcgccatcgcaagaagaaagccaagagcgagattgatgaagagtgggatgactgggctgacggcaatgccgacggcaaattagacactcagtccggcggcgatattgcaagtggcaagactgtgggcgatgctgcggatagcaccaccacgaataacgccactgcaagcggcgacgcaacaagtacgtccgcaatcagcccgtccaccgatgccacgccgaccacggtgatcgagccggtgaacgccgccgccgaaccgaaccagattgtgcccgatgactcgggccaatctgacggttccgctcaaacagtctgaaagttccggccatgcgattcagcgacattctgcgactgtgcagacagaacctatggcgacgtaaatcccgcacaatactgaccgtgctgggcgtcatcgtcggatgctgctcgattgtgctcatgatctccctcgggcagggcatcaacgagcagaatgaaaaaatgctcaaatcgatgggcgacctatccattgtcaccgtctacaccagtggcggctatgccgggccgatgggcggcgggaacggatcatcgtcggcatccagcgatgccaagctcgatgacaaagcgctcgaatcgttccgctcgatgagcggcgtatccggcgtgactccgataatgaacttcccctacaacgtcacggccaaggccggcgcaggtggacggtacatctacgatcacgtgcagatcatgggcatcgatatgagccagttcgaacagatgggctacaaaatggtcgatggcagtaagccaaccaccaaagaccaggttcttgccggtgaatggtttgcttacgggttcatggacacgttgaaaaacggtgagatgcgtaccggcacccgtggcagcggctattcgtcttgcacattcaattcggccaccggcgaatgcgagccggatcaggatgaggacccgttcttcgacccgctcaccacgcaaatcagcctgaccaccggaaccaactatcagggcgacccatatgtgcagaacatgtacggcgggggaggcggaacgactgttggaagcgaccaatccgacaacgtcaccatcgatctgcgtgcgtccggcattatcggcggcgattacaacaagggatatgccacggcggacggtctggtcatggatttgcaggcgctcaaggatttgcgcgccaaagtcgatccggccgccgccaaaaaaaccgtcacctacgatcaggtgttggtcaaggctgcggatctttcctccgtgcccgaagtggaatcgcagatcaaggcgcttggctacgagacttcgtcctatgaggacatgcgcaagtcgttggaggagcagtcgcgagcgattcagctgattctgggcggcatcggcgcggtctctctgttggtggcggccatcggcatcgccaatacgatggtcatgtccgtgaccgagcgcacgcgcgagatcggcattatgaaggcgctcggctgctacgtgcgtgatatccgcgtcatgtttttgactgaagccggcgcaatcggattctttggcggattgatcggatgcatgctgagtggattgatatcgttgggcatcaatgtggccggcaggatgtatgcgggcggcatggtcggcagttcaaacggaagttccggcgagggtgctggtggcacatctatatggatgattatgtggcaggcattggtcggaggtgaggatgtgacccgctattcggtgattccgtggtggctgttcctgtttgcagtgctgttctccacgctaatcggcctgctgttcggcttcggtccggccaacaaagccgtcaaaatcccggccctggatgccatcaaaaacaacgagtgatcgcctctgtcacctgctccaccgtcagtccataacgttcgttcagttcgcccagcggcacgcggtcggtaaattccttggctgcgccgaagttcagcacacgaggattgcggctgctgtccgagatatgatgattcgcatagtatgcggtcaccttctcaccccagccgccttccagctgcccgtcttcaagcgtgacgaccagctcgtggccgtcacgcaacgattccagcgcatccgcatccaacgacgtgcactggcgcgggtcgatgaccgttgccttcatgctatgttcggcggtcaacgcggcagccacctgctccgcaagcggatatgcgttgcccaatccggcgatcgcaacccgcgaaccagtctgattaatacgccaagccaaggggtcgctcccgctggtgggctgagccgttacgccagcgactcggtgtgctgcggattcgctcccgctgtcgggagctgtcgacacagtcgactgagggtggccaacctgaacccgtccacccgtcaccggcaacaaactcggctcccgttccgcagccagaatcgcctcacccggcacccgaatcaccaccggcccatcgggagctccatcggctccagccggcagcgtcgcccatgccaaatcggccagatactcatccgccgaggtgggcaccagcatcgtgatgccaggaatattggcgaacatcgccacgtcatacgcgccggaatgcgtgttgtcggaaccggataggccgcctaggaaatcaagcaccgtcacccgagaccggttcaggctcatctcctggaagaactggtcataggcgcgttggaagaatgaggccgtagtggccaccactggtgtgccgccagcccgtgcgatgccagctgcgaaagccacggcatgcgattcggtgatgcccgtatccacataatgcgagcctgcgcgttcgcggaattcatgggtgatgccgttcgaccctggcgtggcgggggagatgaccaccaatcccggttcgctggcaaatcgtggttcgagcgcggccattgccatcttgccataatatttgcgcggatcatcaggcttgccgatggcggaatccgggttctgccaatgggaggcttcgcactgaccctcatgcggttcatggtcggacagattacaatgatccgaatgccacggttcacggtgcgatagattgctggacgggtggattccggtggcggagctggtgggctcgccgtcgtagccggcacccttcaacgtgtggatatgcaccacaacagggtggtcgatattgcgtacttcctcaaatgccgctaccagcgcatccacatcattgccatgctccacataacggtaatccagtccgaatgcgttgaataggttcggttgtacagtgccgcccgaggcgcgcagccgggcgagtgtcccgtacatgcctccgaaatcaccggcgatcgacatctcattgtcgttgagaataataatgagattgccgccttgctcagcggcgttattcaagccttcaaatgccacgcccgagcttagcgaaccatcgccgataacggcaactacattgccgatgccgctatcgggcccctccatattgcgggttttcgccaatccgcaggccaatgaaattgaggtaccggtatgccccagcacgaactggtcatggtcgctctcgtccgggttcgtgaatccggtcacgtcgccgaatcggtttgtgtccagataggcggcagcgcggccggtgagcattttatgcacgtaactttggtgggagacatcgaacacaatgcggtcatgcggtgaatcaaacacgcgatgcagtgcgacggtggcttccaccatgcccagattggagcctatatgcccgccgtgaatatggccgtaatgcagtagggtggtgcgaatttcgcggcatagctcattcagtgtattgggggagagtgctttgacgtcggcagggctggtaatgcgacgcagcagggtggcatcggcgagattgcctgagtcgggggaatgagtgttgtcggttgcgccgctggcatcgtgtgcactgattccatttcccggcatgctatgcatatcctcgaatctccctccacaattcataccgaaatcgacatgctagcgctgcgcaggcggcaacgtgcgcggatgagggcaataccctcaacatctccgtaaatactgcaaatactgcggcgatgaggagggatagcggatttgatacagcatgcagcatggatgggcggtgttcacagagtgttgtgtgggaaaataaaggaggtaatttgccggaccttgtggtgaccggccgatcttcaaggagcgtgcaatgaaggccgtatatgcgtctgccgtcaatcatgatgacccgttatccgtgctggcggtgggagaccagcccgagccgcagagccggccattctggtcgaccgtctcggtacgtgccgtaaccgtgaatcatcatgatgtctggtctctgcagggcgtggggttgtcggccgaacagacgccgatgatcctgggcaccgatgccgtgggcattctggacgaggacattcccggcaagcatgggctgaaggccggtagagaggtagtgctgtacacgttcgtcggtactgatggtgccggtgtggctccgggggagcgtcgcacgattctttcggagaagtatcccggtaccatggccgagaaaaccgccgtaccttccgccaatgtgtttgccaagccgtccaatctcaccgagattgaggctgcggcattgggcaccagctggctgaccgcatattcattgctgttcgacgcggccggtgtgaagcctggcgactccgtgctgattcaaggcgccggcggcggcgtatccaccgcggcgattcagcttgcgcaggcagccggccttgaggtgttcgtcacctcacgtgaagcggacaagcgagtcaaggcgttgaagctcggcgctcatgccgcatttgagattggtgcccgcctgcccagcaaggtggacgctgtgattgaatctgtaggagcggccacatggagtcattcgatgaaatccgtacgaccaggcggcaccattgccatctgcggcgctaccactggagatcagcccggcgctgagctgacccgtttgttcttccaggacatccgcgtgcagggcagcaccatgggttcgcgtgaggattttgctcgtttgctgcgctttgtggaacgtgccaatctgcatccggcgattgattccgtattctccggtctggatgccgctcctgaggcttttgccaagatgatagaaggcaatgtgttcggcaaaatcgccattgagctgtaaggcatgtcgaagtaagcgcccgggcgtacagtggacgtattctcaataactagggagtaaatgataatggcaaatgaatccaagcctgaagtcgcagtggtcatgggatcttccagcgactgggagaccatgaagcgcgcctgcgatattctcgatcagtttggcgtcgcctaccacaagcaggtcatctccgcacaccgcacgcctgagcttatggccgagttcgcgcataatgctcgtgccaacggtctcaaggtcatcatcgccggtgcaggcggcgctgcccacttgccgggcatgattgccgcccagaccacgctgcccgtaatcggcgtgcccgtgcgttcccatgcgctctccggctgggattcactgctgtccatcgtgcagatgcccggcggcatcccggtggccaccactgccgtgggcaactccggcgccaccaacgccggcctgctcgccgtgcagatgctctccgcctttgagccggagctggcgaccaagctcgaggattaccgtaacgaactgaaggaaaaggtggccgaatccaatgcccagcttgtctgaggaaacaggcggtcgtgtttcgatgctgatgccgggctcgaccatcggcatcatcggaggtggtcagctcggtcgcatgatggctttatccgcccgttatatgggattccgcgttggcgtgctcgatccgacgccaaactgcccaaccggtcaggtggccgatttccagatcaccgccgaatacgacgacaagaccgccatccatgatttggccgtgcagtccgacgtgctcacctacgagttcgagaatgtggatgccgacgccatcgatgaggtgcgcggcatcaccgccaccccgcagggcaccgatttgctgcgcgtcacccagcaccgtgtgcacgagaagcagttcattaacgatcacggcaccgccaccgcaccgtggtgcgccgtcaacaacttcgatgagcttgacgccgcattggatgagattcattacccggccgtgttgaaaaccgtttcgggcggctacgatggtcacggccagatggtgttgcgctccgatgccgacctcgagaagattcgcgcgcgaggtgatcgcggcggcggtttccccccgagcattctggaaggctttgtggacttcgcgttcgaggcctcgattctggtgtccggcaacggtaaggatttcgtgaccttcccgatcgtgcgcaacgagcatcgtaacaacatcctgcacatgaccatcgcccccgccgaagtgtccgaacatgtggctcgcgaagcgcatgaactggcgattcgcttggccaagggcttcgaactggctggcacgctggccatcgaactgtttatcaccaaggacgatcaggtcatcgtcaacgagctcgccccgcgcccgcacaactccggccactacaccatcgaggcctgctcgatggaccagttcgacgcccacatccgcggcatcgccggctggcccatgcccaagcccaagctgctctcgccggccgtgatggtcaacgtactcggccagcatgtggagccgacacgcgcgctgatcgccacccacccggagtggaatgtgcacgactacggcaaggccgaagtgcgccacgaccgcaagatgggccacatcaccgtgctcaccgacaaccctgatgccacggttgctgaccttgaggccaccggctgctgggacgacctgaaaaagaaggcgtgaccttatcgatggttgaacatatcgaacgccagaccaagcagaaggacgcgattcgcgccgccttggccgactgtgaggagttcatctccgctcaggacctgcaccgcaggctggaggacgaaggctcgaaaatcggcttggccaccgtgtaccgccagctcaacgccttggccgatgccggtgccgccgacacgatccgcctggacggccagcagctgttccgcctatgcggcgacgacggacatcaccaccacttggtgtgcaagcggtgcggcaaaaccgtggaaatcgacccgcccagcgaggcttggctgcgcaaagtggccgacggccacggcttcaccgtcgaatcccacaccttggaggtcttcggactatgccctgattgccaaaaggagcagaaagcgcaaaaggccgcggcccaatagccaagcggtcaagtaagcgaaatcaacggagtcccggccatttggtcgggactccgctatatatggccattccttgataaaaggtagaaaaatacctgcaacgaatatgggattgcaccgttgcctgatgcattgcaggtataaagcggtgttttagaactctgtcaggctcccttttcccatgttcctcacgtattgcaggtattttggtatcatctacgagccgattttgcaggtaaaaagtgttcatgaagccaattgcaggtatttcgataccatgtacggcgcgaaaaagcccgtatatggtaccgaaatacctgcaacgcccataactagaccggaaatacctgcatgtgcgaatcaaagatgatgtgtgcatcaatcggttgtggatttccgtttggaatggaccattgaccgcgcaaacgtccctcctcgtcagagaaaacatcgatgttcacgcgagccgacgctggcggcaggttcaaatcgatatccaatgagtttggaatgtcacagtcggtaccatctgctggatacaaggccgactcgctggtcgaatgagggactgtctctttaagtgtgtaactggcagtttttcattgtcagttgttcctgtcgtccggccagcggtcggcgaaggtgatggcgaacgcgttcaacgcgggtttccgtcgtgccgcccattttacctgccccttgccggtcgggtccagcgacctgacggtcaggtacaggcacttcaacgcggcccgctcgtcggcgtgcaacccgcgtcgcgcgccacgcgggcgagaggctcgccgcccagcgcgcgtctggccgcgttcgtcttgcatttcagcgtatacggacgcctgcacgcgcccgtgcctcgcggggtcctcgcgaacccatttcgccagcgcgccctcggacgggtagccgagctcggcgacgaccttcctgatggtcatgccctccgtgaaatacatgtcaacggccccgcgctgctgctcgccgccagaaagttgtgcggggaagttgtcgatacgctccttgagccccacgtcgatgagcgcttgggttggatcctgcgcgtcatgcacgatttcggaggcgagctccacgttctccttggccgtgaggttggccaccagattgtagaactggaacacgaagccgaggcgttgcgctatgtcaagcgtgagtatgcgttcttcgacgcactgtcccgttcgggcaacgatatgcagatgcatgaccgggtcaaggatgtgttgaagcagatgctgcttgggcaggcggcccgtgtgggtgccgagctgagctacagcggcattccgcacgactatgcgctggaaattctggtctccgccgtctcatcgattatctggctatggatccggcgcggctgcaaggaggcgcccgagcaaatctgcgccatcatcgagaaaaacaaaaccaccgcgcccgtatacatcatacggtaagcgcggtggttcgtgtcggaatttggccccctccctgagaggggtcaatccgcaggagaaatcggaaacctaaaactcagacagccagctcggccttgagttccttgaggtcggccaggatctcatcgtggcacttctcgttggtgtcgaaggcaaggtggcagaaggcgcactcgtggccttcgcggttctcgtggcaagcgtgcaggcaagccttgcccccgtactcttcggtgtggttgtgctcgcagccggtgtcgtcgcagcagtcgccggcgaagcagcagccgcagcggccacaggcggccacgccgtgctcgtgcttggtggcgtcgaacttggccagcgtgtccttgcagacggcgaaggtgccctcttcggtaacgatctcgtaagcatgctcatcgatggtcttgatagtcattgttgttcctttcagcgtttgttcgtctgtgactgtagggcggcagacggcagcggcgaaagttggtgaaagtgattatcaggcccattgctgctattaagagcaatgagacctcatgcagttttgtgtcggtaacgggccgattgttggccgagtgtcgacgcctggtataggtggtggcggtaccaatccaaatattggtggaacgacgacgatgagcgtgtctggcgtcggtgctgcgccaagcgttggcaatctaacgatgcgagtggagcttatatcgtcgctattgcgccaaggattggaagggcaccgatgctgaaggccagtagcgtcgggactgcgccattatttgttcgagcgccgacggccagtatcgtctggcgtcgtcagtggtccatcctttggtgaggtgccgacgctgagaggcggttcgatggcatgcttcgccgcacacttggggcacaggtcgaaaatctccagttcgtgggcgatggtctggtacttcaactgcttggcggctttgtcgatccactgctcaagtccgggaatctcgatttcgatggtccgcccgcattcgtggcatacgatgtgatggtggtgatgctggtccgagcactcgcggtagagggcctcgccgttgacgtggattacgtcgagctcgccttgggaggccatcatctgcacattgcggtaggcggtggccgtgccgatgcgcgtgccgcgctcgcgcaggatgtcggtgatttcctgggccgtggcgaatcgggatagttccgccaggacctgggtgatgaggagtcggggtcgcgtcacgcgccgagtggtcgcggtttgctcgatgctcatgacgttatgcccctttccgttaacaaatgatattcattatcgttattaaagcaaatcagatgcccggcatgttgtcacatgatttgaatcaactggcagaaatcccgcgtttcaacgaggcctgcgcgggatttctgccagttttgagccctataaaggcagagcccctgcgtacctttcgttgtaacgcgggatttctgccgatatggggcgagtcatggcgcagcgcagtgctttccatttcgggagacgcgtcatttactgccagtagaagtagccggtcggggcggctgcggctttgctggccgaccggacctgcagtatcaggccttggcgctcgtggccggcggagccgtaggcgccctgcttgatgacggcgtcgacggtgacccagtcgtgattgtgcggggtgccggccttgccggagctggctatgaacccgaatggggtcatgtcgagaatgcagcaggacatgaactggcgggacagctcgaactcgtccgcgtcgaacgtacgcgacttgctcacaaacccggtgacctgcacatggtaaccgacgtaacgctgcggattatggtcgatctgctcgaaccatgagccgaattcgtcgtcgctgatggtcagggtcttgttcgccgtgtcgagtccgtgcagctgcgaggagccatcaggcttgtgcgagctgcggggaatgacgatagcgcggccaccggcgtactcgtcgaagctgccgctgccgctgctgggctggaacggcacggcgatcagcagcgccggaataatcaaggcgatcaggaaccgtaaaaccgaacgctccgtggcatggaacagtccgagccatgctgcggtcgccagcacgaacagcagtaccgcaccgatgatgagatacggcagcgaacgcggcgtggtcagcgtggtgtatgatccgcccaccgctgcataggcgatggccgcgcccagcgccgcgaaacacagcgcctccacgcggtcggggagtgcgactttgcgtttcatggctacgctcccatcaccagatgggcggcaatcgcggcgaggaagcaggccgccgccacggtcgcgatgaaccggatgatgaaccgtggccggcattccgtggccagcatcagcgtgttcttgaggtcgagcatcgggccgaagaccaggaaggcaagcatggcggagaccggcagcgcgccaatcatgctggcggcgatcaccgcatcggacgtagagcacagcgaacacaggaacgccagtcccatcgccgccagaatcagtacgatggcaccagcgtcatcgagcgtgcttgaaccgttggtcaacgacgacaatgcggtgcgcatgatggaggcaatgatcgtgccgaacagcagaatcggcatcatccgcataaagtcgtcatgcgtatgccgaatgaaatgcgtgaaccgctccaatccacgccccgtgccacgccggcggggctgtcgacaaagcccgactggggggtggctctcaggcgaatcacccgtcgcccctgcacaatcctcgcaaaccaacgaccgcccaatcgtcagcggcctctcacgtaccgcaggggagcggggcggccacaccgcgaacgacacccccgcgactatcgccactaccatgcccaaccccgcgcgggccgccaccattcctggtttgtcggtgaatgcgaaccatgtggaccatatcgccatcggattcatcaccggcactgcgcacagaaacgtcaccgcacacggcagcggcaggcgtttgcgcatcagattcgcgaacgtaggcaccaccatgcaatcgcacaccggtaggcacagaccggccaccaatgccgcggccagtccgccggccaacgatttcggtatgtggcgggccagaaaatcggcgctgacgaacgtgctgaccgcggccgacgtcatcgcgcccagcagcatgaacggaatcgcctgcaggataagccccgcggcaccggtgccgatacgcaccagcggaaccggaaacccacgcgactcgagcatcgcggaagccgcaatcaggaacgccaccagcggcgtgccgataatcagaaacaaatagttcgccgaatggtcctgttgcgcggtgttcacctgttccgtgcgctgcgtgcgaggttctttcatgcgaatatcacctgccatatcgccgtcatattagcaccgtacgcatgatagtggtcgagataatatgcgagttccccgcatgccgatggtacacatcgatatgcggggaactttgcacatggttgcctgggccgatggcgaatcagtgggccagcatctcggtggccacttcctccttgctcatggacaccgggtaatacgtgggccagttgtccatttccttgagggtttcttcctgtcgttgaagtgacgttgcacggtggcggcggtggcagaaccggccccggccttgtccgcgtaggcggcgttgacgcccatgaggtcgcccgcgttcccgatggtctggcgtttcttgtcaagctgcgcctttccgcccaaccgtcatagccggcgccgttgagccacgatgtctgccttggcgagcttggccagatcggatgcggtggactccataaaacggcggttcgccccggcaggtggcggcgtacggaaggaaagtggacttggtgaggaagtacttgtcggcggagcggtcatagaagaccacggggccgtattcggggtggatgccctcttgcatggttatggacctttggttgtgtggtgttgtgtggtgatatggatgagaatggcgtcggacgcgcgggtggaatccggtgaattgagatggcctgagacggcctgacggccggttgtgccggcccgatcaccagctggatttcaccacgccgggcagtttgcccttgtgtgccttctcacgcagattgatacgtgacaggccgaacttgcggttgtaggcgcgcggacggccgtcgatggaatcgcggttgcgcagacgggtgggctggcgtcgtgggggagggcctgcagcttgcgcatcgcctcggcgtgttcttcgtctgccgaaaacggcgggatcccgcgttgccgtcgtcggggcgcgggattcccgccggcagcgcgggtgtgcgcgtgcaacacgccgatataaatgctaatgataataattctcaatacatgttattctgtcgtgtgggtggccgagcgatgatgcagcaacagcaacatcgcccagccaaacagctgaattagagaggaaaaaccaatcatgtccatcatgtccaacgccaagcgcgcgctcgccatcgcggccgcctcggcgaccctgttctcgatggccgcctgcggttccagcaatgccgccggcagcaagtccgattccagcagcgccgcgtcttccggcaagatcgaggtcgtcgcctccatcaaccagtggggttccgtggccaaggacctcggcggtagcaacgtcgaagtcaccaacatcatgaccaagaccaacgtcgaagcacatgattacgaacccaccagccaggatgtcgccaagtttggcaccgccaaggttgccgtggtcaacggagccgactacgacccgtgggccaccaaggccgcgcagtccaccaaggccacgctggtcaccgccgccgaaaccgccggcatcaaggaaggcgacaacccgcacgtctggttctccgccaaggtgcgctccaacaccgcggacgccatcaccgccgcctaccagaaggccgatccgagccacaaggacgactacgccaagttcaacaaggactggcatgccaaggaagaccagctcgaatccaagatcaaggacacttcctccaagaccgagaacctgccctacgccgccactgaatccgtggcttggtacctggccgacgacctcaagatgaccgacgccaccccgaagggctacgcgcaggcctccgccaatgagagcgagccgaccccggccgacatcaaggacttccaggacaccctgaaggccggttccatcaagatgctggtattcaacagccaggaagccaactccaccaccgaccagatcaccggcgccgccaaggacgccaacgtgccgatcgtggagctcaccgagcagatgccaaagcagtacaccaacctgctcgactggatgagcgcactggtcgaccagttcgccgccgctgtgaagtagcccaaaccgcatatgttgccgcatatgcatgcaggtcaactcgataatggggtgtctgaaaggatcgtgtggggacacgccttaaggcaattcgaatggcctgatatcacgcggcaatagatgcgatatcagggaagactccttatcaatcagggtgtttcggggatacccccgaggcaccctttgcgttagggtaaatagttaggaaacagtaagaaaaacagtggaactatggattttccaaggttcggcggcaacaatatgcccttgaaaagtcacatacggaaacagacgaatgagcgaaaacactagcagtactaccacagtgaaaccccgtttcaagctttggtccaagcgggccgaagccgacgaagtcacgcccaagcgcacgtataagcctttccctagctgggtatacggcgtgctgttcgttatttttgacatcattgtcgtggccgcgctcgaagtgggcgtctcttccagctccacccgtgtgcagttatccagccccacggtcggatttggctttgtgagcaagatgtggaccgatggcaacttcgtattcgtgctcaacgtactgcttgtggcgctgctgtatctcatgctgcttatgctgttcaatcgattctggacagccagcatcgtgattcttggcgtgggcattatcgtggctgccatcgagcacttcaaagtcgagatccgctacgaggcgattctgcccgccgaccttggcttcctcggttcaaacaccggcaatatgttgacattcatccctgccggcgcgcatgtaacgattcttgtggcactcggcgcgttcgccgtactgcttgccgcgattctggtgatgcggcactttgacgggcgcaaaggccgcatgattcgtacggacaatttgagcttgaatctcacctcccgactgattttgctgctgctgccggttctggtattcgcactgtattgcattcaggtgagcaccaccgactccgtggccaacaagttttctcgtaccatgggtgacattccgtccatgtgggattccgtatatgacgcgcagcgcaacggtccgctggtggcgttcacccgccagctcaacccgaaaatcatggacaagccaagtgactattccgaggaaaccatgaagaaggttgcggcccggtatcagcaggaagccgaaaccatcaacgcttcccgtaccaacaacctcaatgattccaccgtggtgtacgtgctttccgaatccttctccgacccgtcgcgtgtgccagggctgaaagtcaacaaggattcaatgcccagcatccgcaaaatcaaggcaagcaccacttccggtctgatgctctcctccggctacggcggtggtacggccaacctggaatacatgggattgtccggcctgagcatggccaacttcgattcctcgctatccagcccataccagcagctggtgcccagccagcattggacccccaccatcaatcagctgtggggtgcgcccgccaactcgcttggttaccatccgtatgagtccagcatgtactcgcgagccacgaactacaagaagttcggcttctcgcacttctacacattgaccggaccggacgtgatcaagtatcaggacaagatcgacgagtcgccgtacgtgtctgataagtcatcttatgattccgctttggaaggcatcaaggacggttctgcgagcaagttcatccagatcatcaccatgcagaaccacatgccctaccacgaatggtatgagaacaacgactacaccgccgaatccaccactggtacgccgctgggcgacgacgagcagcagtcaatcgagacctaccagaagggcgtagagattaccgatcaggccacgcaggagttcctggacgagctggatgcactcgataagcccgtcaccgtggtgttctacggtgaccacttgcccggcatctattcttccgccagcgaggatggaaacaactccctggcgctgcatttgaccgactacttcatctggtcgaacaaggcctcaagcacccaaggtaacaaggccagcgatgcggcctactcgtcgccgaacttcttcgtggcgcaggctgccgaacatatggacgccgaggtgagtccgtatctggcattcctgaccgaaatgcatgccaagattgccgccatggaaccgcccgtggtcaacaagattcaaggctgggatcgtattcccgaaggccagaacatctatctcgaccaaaacggcaacccgatgtccgaggatgattttgacgccgaaaccaagcagctgcttgccgactacaaactcatccaatacgacatcaccgccggcaaaaactatctgaaagatactgattttatgacgctgccgtaaagcagacggcctagtaggctgtctgtaggcagcgtacgagccgacaggcgagccagcaaggcgcgggtgcagcccgtctgaaattgcagtagcactgccgtaaagtaagggggcttccatgacgaacgagactttcgaacaacttaaagttgcctacgaatccgggctcacgcggccgttggcatggcgacgtgcacagttgaacgcattgcgccgtctggttatggagaaccgtgatgctttcatctcctcggccatggccgacttgggcaagcccgcggctgaaacagtgcttatggaactgaacctggtggctggcgaggcgcagtttgtacgcaatcgtctgggcctgtggactgcccggcatcccaaggcgatgcattggatgctgcagcctgccgccggatggacgatcgccgagcccaaaggcgtggcgcttatcatctcaccgtggaattatccggtattgctggctttggagccgatggccgacgcgctcgccgcaggcaatgccgtctgtctgaagccgtccgagctctcaccgaatacatccaaactgcttgctgaactcgtgccgcaatacctcgatgccgaggcggtgcgtgtggttgaaggcggacctaaggaaaccggtgatctgctgaagaatccgttcaaccatatcttctataccggtggcgggcgcgtcggcaaaatcgtgatgagggcggcggccgagaacctgacgccggtcacattggaacttggcggcaagtcgccatgttttgtggatcgtactgcggacatcaacgtggctgcacgccgcattgtgtggggcaaattcaccaatgccgggcagacctgtgtggcgcctgactatgtgcttgccacgccggatgtggctgaagcgttggccaaacgtattgccgtggcagtcaccgagttctatggcaagaacccacaggattcgccgaactttggccgtatcatcaacgaacggcactttgacagactctgcaagctgctgccggtcggtaccgtgccctctgatgagccgagctctccgctgattcaggtggcgtctgcggttggtgctgcggtggacatggtcgggaaacgcattaatgccgctgcgtctggaaatacggcagctgaggcccgtcctgataccactgagaccggtattgttgcggtgcctggcgtggtggatccggccggccgtgtgatgtgcggtggtaaggtcgaccgggctgctcgctacgttgctcctaccgtgctgtacggcacgcagccggatgcgccggtgatgggggaggagattttcggcccgattctaccgatcgtggtggtcgaagatgccgaggctgcaattcgtttcatcaatcggcgatctcgcccgttggcagcatatgtgttttcgcgcgaccatgaagtgcggcttgccttcgagcgccagaccagttccggtgctcttggatactcattgccgctgggccatctgctttccagccgactgccattcggtggtgtgggcggttccggtatcggtgcgtatcacggcaaagagggcttccgcacgttcagtcacatcaaaaccgtggtcagcaagccgcagttccccgacaccctatggttggtatatccgccattcaacgaggccaaagccaagctgatggatctcatctcaaagctgagttgaatgatgatgttttcggtgaaattttctgctattcaccggtggttactctgatacggcgaatgtttgctgtcccggttcgtaaaaaagagtcaaaatcgactactgggacagaaaaatttggcccggtagtcacgtcaatcgtgtgatctgactaccgggccaaaatacgcggctaacgctccatcatcatgcgttcaggtttcctgaagtagcagaagtggtgcagctgcaaggcgtgtcgaggaaggtgccgaaccgtatagaggacagcccagtgggctgtcctcacccgaggggagcggttgtgtcgcgacggttgcgtgtagcgcaacaggtacgtcgacgagacagcaacgcggcagatgcgccgttctgctacttcagggctttgaagccgatgtcgtggcgatagaacattccccgcagttcgaatttatcgatgattgcgtagaccttgtcctgcgcggatttgatatccggagcggaggtctcaacgagcagcacgcggccagagttggccacaaggttaccgtgctcgtcagaggcgacaccggcgtagtagacgtgagaatcctcgtcaacgtcgatttcgggcacgtgagcacccttgataacgttctccgggtagccgttggaggcaatcaccacaccaagggtggcgttggactcgttccacgtgaactcaggggtttcgccgtcgagaatggcggagatgccagcgccaaggtcggaagtgagcttggggagcacgacttcggtttccggatcgccaaaacgagcgttgaattcaatgaccttcgggccgtcggcagtggcaatcaggccggcgtacagaatgccggtgaacggcgtgccttcttcagccatgccctcaacggtggggcgcacgatagtttcgatggcttcgtcaaccacggactgcggaatctgcggaaccgggctgtaggcacccatgccgccggtgttcgggccttcgtcgccgtcatgggcgcgcttgtgatcctgggagattggcatcggccagaaatcagtgccgttgacgaagctcatcagggagaattcctgaccgtccaggaagtcctcgataacgaccttggcgccggcagagccaaagcggtggtcgataaagatgtcttcgagagcacgctgagcggtgagctcgtccatggccacggtcacgcccttgccggcggccaggccatcggccttgataacgatcggagcaccatgctcgtgtacgtagtcctgagccagctcaagatcgctgaaggtcttgtactgggcggtcggaatgttgtgacggtccatgagctgcttggcgaaatccttggagccttcaatctgggcggcggccttggatgggccgaacgccttgatgccggcggcggcgaaatcgtccacaatgccttcgatcagcgggacttccgggccgacgagcacccagtcgtagtcgttgtccttcacgaagtcgatgagtgcggcgtggttcgactggctgagctgcgtggtgtggatgccgtccttgagcatgcccgggttgccgggggccacggtgacttcgtcaacgctcggtgccttgagcagcgtgtaggcgatggtgtgctcacgcgctccggagccgatgaccaatactttctgacccatgttgttcctttcctgcggaaagcgagttacttcagtacgatttgcgtgccggtggtgtcggcggtgatggagccgagcacgtaagcgggctcgttgttgtcggtgagcagcttcagcgcctcgtccttgcgggcggggtcgatggcgagtaccatgccgatgcccatgttgaagatgttgtacatctccttgtgatcgatgttgccggccttctccagcacatcgaaaatcgggagcacaggccaggtgccgagctcgatctcagcggccaggccgtccggaatcatgcgcgggatgttctcgatgaagccgccaccggtgatgtgggccacgcccttgaccacgcctgccttgaacagtggggagagagccttgacgtagatcttggtgggggtgagcagcacgtcgccgagcttttcgccgcccagctcgtcaagttcggtgtccacggtgtagccagcctgctcgaacagggccttgcgcaccagagagaagccgttggagtgcacgccggtggaaggcagaccgatgagtacatcgccctcggcaatggtggagccgtccacgatggcggacttctcggcgacgccgaccgagaaaccagcgagatcgtattcgtcctcgtcgtacatgcccggcatttcagcggtttcaccgccgaccagtgcagaaccggcctgcacgcagccgtcggccacgccggcgactacttgctcgagcagagccggatcgttcttgccgcaggcgatgtagtcaaggaagaacaacggttcggcaccctgggcggcgatgtcgttgacgcacatggccacgcagtcgatgccgatggtgttatgcttgttcgccatcttggcgaccatgagcttggtgcccacgccgtcggtgccggagatgagaaccggctctttgtatccaagggaagccaggtcaaacaggccgccgaagccgccgatgccgccgaccacaccggggcggttcgtgcgggctacgtgcgacttgatgcgcttgacgacttcgtacccggcttcgacgctcacgccggcgttctcatatgcttgtggcatttggttgggcctttctacttattctggctcccctctggaggggagctgtcggcgaagccgactgaggggaggctgtcgtctccgatcaaaaagttgttgttgggtttgtcgggttgtacgttacttattttccggctgcacggtgttgtactcgttgccgatgtacttgctcttgtacagcgcgaattcaggcagacgcacacggtcctcgggcgtgagggacttcaggaagtcggcctcgtagtcgtcgagcgcggtggggtagtcgccgttgaagtaggcgacgcacaggccaccgtatggggcgtcggcgttcagtccgatggattcgaccagaccgtccagagataggtaggccagcgaatcggcaccaatgtagtcgcgaatctcttccacgctcatcttggctgcgatgagttctttggtggtggagatgtcgatgccgtagaagcacgggtacttgagcggcggcgagctgatgcgcatgtgcacttcggcggcgccggcctccttcagaagctggacgatgcggcgggaagtggtgccacgcacgatggagtcatcgatgacgatgacgcgcttgcccttgaccacgccacgtacggcggacagtttcatgcgcacgccctgctcgcgcagttcctgcgtgggctgaatgaaggtgcgggccacgtactggttcttgatcagacccatctcgttgggcagcccagccgcttccgcgtagccggaggccgcggacagggaggagttcggcacgccgatgaccatgtcggcatcgaccggcgattcctgtgccaggcgtgcgcccatgcgcttgcgggcggagtgcacgttgatgccgtagatgttggaatccgggcgggcgaagtagatgtactccatcgagcagatggccagctgcgtgttgttggtgtactgcacgatcttgtagccgtggtcatctatcaccacgatttcaccggggcggatgtcgcgcaccagctcggcgccgaccacatcgagggcacaggtttcggaagcgagcacgtaagcgccgttcttcatcttgccgagggaaagcgggcggaagccgttcgggtcgagcgcgccgatcatggcgttctcggtcatgagcagataggcgaagccgccgtgcacggtgttgagcgcttccttgagcttgtccataaaggtgcgttgcagggagcggcggatgaggtgcatgagcacctcggtgtcggagttcgagtggaagatcgcgccttcgtcttccagcttgcggcgcagtgacgggcagttcgtcaggttgccgttgtgacacagagccacgtcgccatcatggaaacggaagatgaacggctggatgttgtccgtggtgccggagccgaccgtggcgtaacgcacgtggccgatggctcggtcgcctttgagccgttcgatttcgcgctcatcgctgaacacctgggtgagcagtccgagtccgcggtggccggtcagatggccgtgatcgttggagacgatgccggcaccttcctgaccgcgatgctgcagcgcgtgcaggccaaaataggtaagtcgggcggcgtcggggtggccccacacgccgaagatgccacattcctcgtgaatgtcttcgagttcagccgacaagccaaagctcctttttccaaacaggggattaactatctgccaaccctaccaatcggcggctacatcgcgtgttgtctcacagcgaatcattctcaataagaaaagtgtgcgggtgaaaggcggcgaaatgaacattggtcaccgagaagccctgatattccgtcaactgtggaaatgttcgattgtgccgagatgtttggattgctcgcacttttcttattgagaatgattcgctgcgcattgtcgaacaaatgttcgattgctttgctatgctggtcaagctgctggtagtggataaggaggtgatggcgatggcccgagacatgcaacgcgagcatgtctatatcgccatagaccttaagtccttctacgcctcggtggagtgcgcggcgcgtgggcttgacccgctgaccacgcatctggtggtggccgatgaaacccgcaccgataagacaatctgtctggcggtctcaccttcgctgaagagctatggcattcctggccgtgcgcggctcttcgaggtgaagcagcgcctgaatggagtcaatatcgagcgcgcggtccatgctcctggcggtcgattgatcggggagtcctgcgatgtacgcgatttggaacgctcgccgagactcaaagcctcgatggtcatcgccaagccgcgcatggcgcactatctggaaatcagcgggcaaatatatggcatctacctcaaatacgccgcacccgagcacatccatgtctactcgattgatgaggtgttcatcgacgccacgccatatctgcgctcgctgggtatggggccgcatgcgatggcgcgaaccatcgtgcgcgagattcttgccgaaaccggcatcaccgccactgccggcatcggctccaacatgtatctggccaaagtcgccatggatatcgttgccaagcacatgcccgccgacaaggacggcgtgcgcgtggccgaactgaatgaaatgtcatatcgtcggctgctttgggatcatcgtccgctcaccgatttttggcgggttgggcgcggctatgccaagaagctcgagcatgccggcttgatgaccatgggcgatatcgcccgatgctcggtgggtcgtgcttcggattactacaatgaagacctgctgtatcgcatgttcggcgtgaatgccgaactgctcatcgaccatgcgtggggctgggagccgtgcgagatcgcggacatccaatcctatgagccggatgcgcacagcatcagcagcggtcaggtactcaccggtcccgccgactatgccacggcccgactgatcaccaaggagatggccgatacgctggccctcgatctggtcgataaaagcgtgctgacgaaccgactgacgctcgccgtcggctatgacattggcagtcttgattcgtcgaagcttgattcatgcgctgattatgcgatgaaacgtgccgctgagcgggcagcgaaaagctatcaagggccggtgaccatcgaccgatttgggcgcaaggtgcccaagagcgcggtcgggtcgattggtctgggtgatttcacctcgtcgtcggcacgtattcgtgaggccatgacgatgttgtacgagcgcattgtggattcacgcttgcttgtgaggcggttgacggtcatcgccgatgatgtggccactccggaggagctggccgacggcaaacgctatgaacagctcgacttgttcggtgatgacgaggcccaatcgtatggatccgattccaccagcgaaaaagatggagagcatgatatccagcgtgcgctgctggatgtgaaacgtaaattcggccgcaacgccgtcatcaaagctatggatatggaagacggcgccaccggtcaggaccgcaaccgtcagatcggaggccatcgcgcatgaccatgcaagagacccgtgcatacgacgacatcatcaacctgccacaccatcagtcgcgcaagcatccgcacatgtcccgccaccagcgggctgcccaattcatgccgttcgcggctctgaccggttacggccaagtcatcgagcagacagcaaaaaacgccgaaaccgccatcgctcaggccgaggcccaaggcgataccgatttcggcgcttaacaatcgctcccgttggaggaagtctcagattcgtcagcccacgtgacgctcaaagcggtggaagccagtgatcttgtcgatctcggccatcgcatcggctggaatcttggagccggcggccttcatgttgttctccagctggctgggcttggaagcgacttcggtgaacggaagggggaagagcgtcactgttgcggatttgactggtgttgatgtgaaggctgatattccgcggacgcgctgtattgctattgccaatgagatgcaagataggattcgtgatgctgggtttgccatccgagattgatggtttcgccatacttttaggtatctacttttagtttttccaatacgcattctctagtacgtttgccttttgaaaagcttcgcgataggcggtgataaggtccggcaaacgcattgaggcgttggccgggctggtggagggcagttgggtcataccgatggcgatgccggcttcggtcaggcgcggctcgataagtttgcggtaaagttgcgctgatttcgcgccggttgcgaagatgtgggcgattggagcgccgcgcaagattggtgccaagtcgttgggcacggcattgcggatgctggcatcgctggctccggtgatatcgcaagaagcaatgacatcccataacgcaatgtggtggcgcagagcaaacgcacgacgggactcaggtaaatcgccgacagcgtcagtaggatcagcggagttggcaaacagcgcctgcatcaccggccaaaaccggttctgcggatgcatatagtaaaacgccgcctctcgggatttcggactcggcatcgatcccaaaatcaaagcccgggactcaccatcccacaccggcccaaacccatgctccacatgttcgctcatggtttccatcctaagtcgggcgattgagcgcacgaggcaatcaggccgagaactgtttgccgaattccgagaagagctgacggcgggcgaagacgagcaggccgagcagcaccagcagggagaccagcccgctgaccatcaccagcacatcccacggagcccagccgagcggaatgaacgtcagaggcagcagaccagcgacgatgtcgaacgccagatacttggcgtactcgtcaatggccttggctcgcagcacgataagcagcaccacgtcaaagaccagcgaaactagacacgtgatcggtatgacgaacatggtgacgacatgattcatcgtcgccacaaaccagaccagcgcaatcgccagcatgatatagaaatatcgaaacatgaggcgaagaggccgcggcacgtgcagaatcgcactattgatgaacagcacgctgataatcagcgcggccgccgatgcactggcaatcggtatcggccacgaaaacagatagctgaagaagccatgcagcagcaaaatcgcgccggttacaaacgtgatgatttccaccgccaaacgcctcggacgcagatagatctgctgcgcggggaacgtggcgggagaggcctcgccgtgcaattcgttctggcacagcgggcaacggaccatatcgccggtgaaatcaacgttgcaggcgtcacaatgcttcatgccgacgctcccttctccacatgcactccggcgatgctcatacggccgctgatgccctgcgtggcgaggatccggcacagattcttgatgacgttcagatcatggtagatggtggagatgccgatactcaggtcgtcgccgaacgagcagaccgtgaaattcaggctggccggtgtggtgaggaagctcaccgaacgcacatggcgcgcgagtcgttcatccaaggtgactcggccaaggttcgagacggtggtcgtggtctcgcggtcggcgatgaaccgggccagctccagcacccagtccttggcaggggagggcgcgagacgcagcgccggattcttttccagcgcaatcatgcggttcatatgcgattcgacgcgctcgcgactggtggcatggccgagctgctcctgcacatggcgggcgatgtcggccaacggctcatcggtcagcaatccacccataccgttgccgtgcgcggtgcgggtggcggactgccgatcgtcgccggtcgcgtctgggctcgttgcggaagttttcgcggagtcctcatcggcttcgatatcggccggcgtgtacgccacgtaagtcatgccgtagaagttgcgcacggtctccgacttgaagaaggcgcgcaagtcgaccggaatatccacgcgaatcgcgcgattgcgggcgcgcgagggcatgacgtcgcgaatcgcgcacagtatcgcggcgatgaggtaggaggtgaggctcactccgcactgatgtgctgcaccaagcaccttgctggcgctgacgtgatattccatgaacgtgggcgcggcccggtcgatggggccggccagccggtagatcttcgtgcctggcgcggcgccggctttgtcccgttcgtaatatttgtcgaagctgttttcggctttgtcgctgtccgagccgtcgtaatccgaaggcacatccggcacgtcatatcgctcggcaatgtaggcgtgcaacagtgacttgaacaggttgatggcgccgcgaccgtccgaaatgatgtgcgagacctcgagattgacacgattgcggaaataactcacgcggaacagcatgcttttgggcccgtaatgcagtcgcgagcatatcggcagatgttccggctccactcgaggcttatcatccgactgttcgaggtaatgccagaacatgccgttgagcaggtgcacgttgaagctcgggaaccgggcgatggcatggtcgagcgcgtgctgcaggatgtccggggcgatgtcgtccgccagctcggccgaatagcggaacacggtctgcgaggagcggccagcctgggaggagtagaacttgccgatgttgtctaatcggtaccaagtacgtcttgccatgcgtcgcctccttccggtgcgttggcggtggtgccggtgccgggagccggctccagcggtgtgtcgtcgaggaaatgctcgatgatccggtaagtggtggacaccagccctacggccgacgtgttgagcagataaccgtggatgccgtcgtgaatccggtaacaggagacgttgtcgttcaccaattgcagacgacgggcgtacgcttcgtcctcgtctctgagcgggcagtattcggcggacaacaccagcgtgcgcggttgattgctcaggtcatgcgcggtgagcggcgcgaaatacggattggtcaggtcggccacggacgaacggtacatgtcgatgtagtcggccatgtcctgtgcggtgaggatgtagtcggtgccgttggtccgcaccgattcgaacggactggtctccgggttgtagtcgttgccgactaccgggtaaagcagcatctgcgcgcgcggcatgaactcgccgcggtcgcgggccatgagcgagacggcggccgcaagattgccgcccgcgctgtcgccaaacagcacgatgctgtcgggatcgggagcggggtcagacatatcgcccccgctggcgggaatgtctctctggtccgcaggaatatcgctcccgccggcaggggctgtcggcaaagccgactgggggtggccatcagcggcagaacctccacccaccccagaaatcggcaactccccggcaaacaactgccgggccgcctcatagcaatcctcaacggcagtagggaagcggtattcaggagccagccggtactcgaccgcaatcacacggcgctgcaatcgcacggccatatgcgcgcaagcctgcgtgtacaggttgatgccgcccgtggcccaacctccgccgtggaaaaacaggatagtgccatgtggcgtaatcacggggatttccgtgccggagtcgtcgggaatgctgccggtgttgccgctcgacgtgctttccttgatgggtattttgggtaggactttgggtaatacggcgggcagaatcgcggatattgccgaggccactggcgtgtcattggcggaagattcctccagggcttcgggcaggggcgctccataggcgaccagcggcgtgaacactcgcaatggtacggcatatccatccgccataggcgccgaaatatcctcgacacggcatttcggattggcgggtgcctgcttggcgataagctcttccgccacgcgctgcaatttgtacgacttgcccgcgttgggcttgatgtagctggcggccttcatcgcggtgaacaatgcctcgttgatcggcatgacgacaggtcctttcagcggcggattcggtagtgcgaacaccccaaccttagcccatgaccggcatgaacaaaaaagggaaggaacccgagagttccttccctgtgtgccgtatcaggcgcgatgtgcgccgattatcaggcggcgaagtattccacgccggcctcgaagatcggctggtacttgttgccgggcacgttgacgtacaggccgttgccggaacgctccgagtggcccatcttgccgaacacgcggccgtccgggctggtgatgccctcgatggcgagcagcgagccgttcgggttcacgtccagatccatgccgggggtgccggtctcgtccacgtactgcgtggcgatctggccgttggccttgagctgggcgagcacctcgtcggaggccacaaagcggccctcgccgtgggagatggccacggtgtggatgtcgcccaccgaagtcttggccagccacggggagaggtcggaggccacgcgcgtgcggaccagtcggctctggtgacggccgatggtgttgaaggtcagcgtcgggcaggtgtcggtcatcggcacgatgtcgccgtacggcaccagacccagcttgacgagcgcctggaaaccattgcagatgccgagcatcaggccatcgcggttcttcaacaggtcacgcacggcctcggtgacggccggcgcacggaagaacgcggtgatgaacttggcggaaccgtccggctcatcgccgccggagaagccgcccggaatcatcacgatctggctcttgttgatttccttgaccagtgcctgcgtggattcggcgacggcggccggcgtcaggttgttgacaatcagcgtggtcacgtcggcaccggcgcgctcgaaggcggcggcggaatcgtactcgcagttgttgcccgggaacaccgggatcaccacgtgcggcttggcaacggaagaacctgtgtacgcggtcttcttcggtgcgtggaagtcgatggtctcgacggtcttgcccttatcctcgcccttggagcggtatgggaacacggattcgatgccggactcccaagcttcctgcacggcgttcaagtccagcgtctcaccggcggccttgaacgcgtattcagaggtggtggtgccgatttcgccgatttcgaccaggttggagacggccggaagcttggcgttgtctgccagctcgacgatgaacgagccgtatgccggggtgaacaggtcatccacggcgatgctgtcgttcagggtcacgccaatgcggttgccgagcgtcatcttgaacagggcttcggcggtggcgccatagcccggcgtggagacggccaaggcatcgtggaagtcggtgagctcctcgatcacggagaatgcctcaagcagcgcgtccttgtccggagtcaggccgtcggccaggtaacgcggtgcgatacgcacgatacggtggtcggcacccttgaactcgggggaggtggcgcgcttcatgttgcccacggccacggcgaaggaaatcagcgttggcggcacgtcgagatcctcgaacgagccggacatggagtccttaccgccgatagcaccggcgcccagatcaacttgggccatcagcgcaccgagcacggcggccgtcggcttgccccagcgttccggctcgtcgcgcagcttctcgaagtactcctggaagctcaggtaggccttctcatgctcgaagcctgccgcgaccagcttggccagcgactcgaccacagacaggtatgcaccggtgaactggttcttggacataatgtatgggttgaagccccacgccatagccgaagcggtggtggtctcgccgaacaccggcagcttggcgaccatggccatgttcggggtgagctgacgcttgccgccgaacggcataagcacggtgcccgcgccgatggtggagtcgaagcgctccgacagacccttgttggaggccacgttgagatcggtgaccatcttgttcatgcgctcggccaacgtgccctcgccccacggggtctcgtagccctgctgggcttcgacgtgcacggtctggtgcttggaggcaccgttggaggccaggaattcacgggacaggttcacgatttcgtcgccgttccaggtcatcaccatgcgcggatcctcggtcacactggcaatcaccgtggcttcgaggttctcttcgcgagcgtaggtgaggaactcgtccacgtcctcggcggccacgtccacggccatacgctcctgagattcggagatggccagttcggtgccgtccaggccctcgtacttcttgggcacggtgttgaggtccacgaacaggccgtcagccagctcgccgaccgccacggacactccgcccgcgccaaagtcgttgcagcgcttgatcagacggcaggcatcgccacggcggaacagacgctgcagcttgcgctccacaggagcgttgcccttctgtacctcagcgccgtcgagttccaaggactctacattgtgagccttggaagcaccggtagcaccgccgataccgtcacgaccggtacgaccgcccagcaggatgatcttgtcgccgggggccggggtctcgcggcgcacgtggtcggccggggtggcggctacgaccgcacccacctccatgcgcttggccacgtaaccggggtggtagatctcatcgacctggccggtggccagaccgatctggttgccataggagctgtagccggcggcagcggtggtcacgagcttgcgctggggtagcttgccctcgagtgtctcggacaccggcacggtcgggtctgcggcgccggtgacgcgcatcgcctgatacacgtaggaacggccagacagaggatcgcgaatgcagccgccgatgcaggtggccgcgccgccgaacggctcgatttcggtggggtggttgtgggtctcgttcttgaacaggaacagccagtcctgattctcgccgttcacatcaaccttgaccttgacggtgcaggcgttgatttcctcggactcatcgagaccggtaaggatgccgttcttcttgagccatttggcgccgatagtgcccatgtccatgaggcagacgggcttggcatcgcggccgagctcgtggcgcatctcaaggtagcgctcgaatgcggccttgacggtggcgtcgtcaatatccacttcgtccagctcagtgccgaacgtggtgtggcggcagtggtcggaccagtaggtgtcgatcaccttgatctcagtgatggtgggctcgcggccctcctcgctgaagtacttctggcagaattcgaggtcggccaggtccatggccagaccgcgctcgtcaatgaacttctggccggcttcggcgtccatctcgttgaaaccggcgatggtctcgaccttgccgggcaccggcacctgggtcttcagggtttccttggtctccaggctggcctcgcgggcctcgaccgggttgatcacgtaatgcttgatggtgtccacgtcggcgtcggtcagttcgccttccagcgcgtacagcttggcggagcggaccgtcgggcgctcgccctgggagatgagctggatgcattcggcggcggagtcggcgcgctggtcgaactggccgggcaggaactcggtggcgaagaccttggcgccggcgaagtcgggcaggtcgtaggccacattgtccacctgaggctcgctgaacacggtgggcacggtctggtcgaacagctcctgggagatgccttcgacgtcgtagcggttcacgatgcgcagggccttgaggccggtcagtccgaggatcgtgcgcagttcgcccgcaagctgctgggcttcgacatcaaagccgggcttcttttccacgtacacgcgaaaaaccatggaaatcctttcttgaaattattgaaaaattgaagaagtgcggtaaaagaacttggctcccctctctgaggggagctgtcagcgaagctgactgaggggagttgtcatggcggtgaacgtcttgacctcccctcagtcacctatcggcgacagctcccctcagagaggggagccagctatatgttctgctacctgcacctaaacgacttactcggcgacttcgatgccttcggacttggcgagctcggccagacgttcctcgatctcctcgtaggccgggatgatgctgcccagaccacggcggaacaggtccttgtcgaggtgctcgaccttgccggagtggtccttctgatcccacagacggcaggaatccggggtgatttcgtcggccagcagcagcgtgccgtcggtggcgcgacccatctcaatcttgaagtcaaccagcttgacgtcgatcttggcgaagatctcgatcagggcctcgttgatcttacgagccagcggggcgatctcagccagatcctcacgggtgcacacgtcaagggccacgaggtcatcatcgttgacgaacggatcatgcagatcgtcgttcttcaggaagtactcgagcaccggctccttgagcggcaggccttcctccacgcccaagcgggagcagaagtgaccggcggccacgttacgcagcacgatctccaacgggaacatgttcaccttgcgtaccagctggccggtgtcattcacgcgcttgacgaggtggctgtcgatgccgcgcttcttgagcaggtcgaagatgatggtggtgatgaggttgttcagacggcccttgccggtgaagtcttccttcttctcaccatcgccagcagtggcggtgttcttgtattcgacccacagaacctcgggatcatcggttgcgtacagttgcttggccttgccctcgtagagcttttccagcttctccatgactcacctttcaggagtgaaatttctaggtgaactaacggtaaaagggtaccaatcgagggctacaacaacactcacggattacttcacggtaatagtcagcgcatcggccacgtgggcggccttggcgcgggcatcggcttcggattcgccgaccgccagtgccacggccatgcggcggtggccatgcacttcgggcttggcgaaaatacgcagatcagtgctgggctcggccagggcggcggccacgtcggtgaattcggcttcgccatcgccggccaccacgatggcgtggctggcagccaccgagccgctcggaattgtaagtgccacatgctcagcagtaatcggcagacctagaatcgcgcgagcgtgcagcgcgaactcgctcaggcgctgggaagccatcgtcaccatgccagtatcgtgcgggcggggagaaacctcgttgaacagaatcgaaccatcggtgagcacgaacagttccacgccgaacacgccccaaccggtttcaccggctgcctgtgccttggacaccaagccttcaacgacggtgcgtgcaatgtcttgagcccgctcagattcgccgcctggctcagcggccggctgccaagactcgcgataatcgccggactcctgacgctggccaatcggcgcgcatgtcacaataccggcggacgaagaaacagtcagtaccgtcaactcacgttccaatggggccaacgcttccacgattacgcgcgacacatcaccttcatcggcggcacggcggcctttttgagcctcggtccaagcggcatcgatggcatcggcggaacgtaccaccgactgaccgtgaccagacgagctcatcaccggcttgaccacgcatggatagccaacttccaaagcctcggcgcgcagctcttccagtgaaccagcgaaacgatacggcgtggtcggcaagcccagctcctcgtgagccagcacgcgtaggcgttcgcgatccatgcagatcgcagcaatctcggcacttggcactacttgggcaccggcagctgcagctccggccaacatgtcggtggcgatggcctccacttcgggcacgataatgtccggcttgacttcatcgaacaacacctgcaactcggcggcattcgccatatccagcacgcgatattcatgcgccacttgctgggctggagcaccggcataggagtcggctgcgcacacccatgcgcccagccgcatcagctcaatggccacttccttgcctagctcgcctgcacccagaaacagcacgcgggtgggatgtttgcccagcggtgtgccgagcgggcggttcacggcaggaattgcgggggagggggaagtcacggcagtattcacggcgttctcagtcatacccacattctgccatgttgcatggaataggcgagcgctccacggtgcggtgaatgacccacggtgcagtgaaatccgcacggtgcagtaatgcaaaatggcttaattccgcagtttgctaaaatcgtgttaccgcacggtgcgttttttaccgcacggtgtgacgtttaccacatgatggggttgcgattcaggacagaaagcacattcccatggaggtttcaccgtcccaaggaataatgggaactttggccgcctgagggaagcctgagagtggtcgatacagcaccgcatgccattgaaaaagttgtcctgcccgtaacctgccataaatactgcgtatagacacgccattgcgcgcgtaacagagctgccgtaccttagcaatcaccggccgatgaggtttgtagtacggtcgggccaacgttttggggatgacggcggtgttccaaaaccagtacgccgctggctggatacaggggaggccggcataccgatgtcgaacgcggctttgatttctcagcgggcggcagggctgccgggcaatccttttgccaaggcggatgcccgagctgcagcagccatcgccgccggcgaagatgtcatcgacttaagcaaaggcaatccggatggtcagccacctgcatttgtgcaggatgcgctcgctcatgccgcccatgatccttccctgtttcgctatccgtcatttgatggtttaccggaatacctgaatgctattgccggttggtacgagagcaagcacggtgtctccgtggacccggccactcaactgctggcgacttccggctcgtcagtaggcattgccactgttattcaggcgcttatcgatccgggtgagacggttgttgctgtcaatccttattacccgcaatatgaaggttccacggcggttgccggaggtcgattcgagacgattcccgccaatccggcgcgtggtctcctgcctgatttggatgctgttgatccggctgtgtgggaacgtgcgaagctgctgattctcaactatcccaacaatccgaccggcgctgtggccgcgccggaactgtatgaaaccgctgtacgcctagctcaacagtatgggttcatcgtgcttaatgattttgcctatgctgggcttgaattcggaagtacgcgctcgctgagcctattggagacacccggtgcgcttgatgtggctctggaacttgggtcactctccaaaatgtatatggtggccggctggcgcggtggatttgtggctgggaatgcagaagtgttggctgaggtcaaggccgtgcacaggcagaccgcggtactggcgtccagcgtcatccagcaggccggtgcagtggcattggaatccgatcagagcactgtggcggcgctcgccgtgcaataccagcatcgcttcgaagtggtgcgagacggttttacccaagccggcctgccggtatctgaagcgcaaggtggactgttcgcatgggccaaagtacctgagcggtggggcagcgcgggcgtgcacgatggcacagtgagtgaggttagggttgcggatggctcggcagactcggcaaataattccgcggcattcgtggattggttgctgaagaccgcgggtgtcgcattgatgccgggctcgtgcttcggcaaagcaggcgaaggctgggtgcgtatcagtttgctcaaacacaccgctgagctgtttcaggctgcagcgcgggtttcgagggctctgcaagacaagtgattgctattcctgtagtgcggcaacgattaggtcaccttattgggcaaacgtcgctgaaccataccatttcctattggtccggactcggccgccagatgtgacggctacgatgaagcaatgcgcgaaaacgggattgaaaagagcattgaccgcccgctgaccatcgctctggtggtggataccgtgggcaaccagggcaatggcacgtccaattcggccttgcagtgggctgctgaattggagagacaagggcatcatgtgcggctcgtaggtgttggcgcccctgaatatcccgcgcgagtgaacaaggttccgctcgtttcctgggtggcggctaaacagctcatgcagttcgccgagcccagtgacacgttgttccgcaccgcgttccaaggtgtggatgtggtgcatgtctatatgccgttcaagttcggccgtcgtgccgcaaaggtcgcccaccaaatgggtattccggtcactgccggattccatctgcagcctgaaaacgtgctgtattccgccggtccgttacgccatattcccggcatctccagcttcctgtactggttattcaaacattggctgtacaagcgcatcgatcatattcatgtgcccaccgagatgaccgccagcttgctacgcgcgcacggatacaaggcgaaactgcatgtgatttccaacggttattcgcctgtctactcacccaagaagccggttgatcctgaggcgtccgctccggtaccgttccgcgttattgcgtccggcaggctcgccagcgagaaagatcagattacgctgattaaggcagtttcgatgtcgaagcatgctgggggcatccagctcatcatcgccggtaccgggccgctcaaacagtatctcaggttccgtgccggtcgtttgctggcacgcaaggccgacatcggctttcacaagcatgccgatatgccggatctgctgcgttcgggcgatctgttcgtgcactgttcgattgccgacatcgaatcggtgagtgtaattgaggcgatggcttgcggcttggtaccggtgattgccgcgtccgaattatcggcggccagccagtttgcgctgctgggcgaatcgttgttcccggtgcagaatgcggcgatgctggcacggcgtatcgattggtggatcgaacatcaggttgagcgtgtagaatggggtgagaagtacgccgaatacaccaaggcgcactattccgtggaagcctcggttcacaagttcgtggacatggaacgcgaagccataggggagtaggttcgttttgaccggggtctctccctcagtccgccttcggcggccagctccctcgtcagagggagctggcatcgcgaagcgatggcggagggagagacctggagctcaacggtcacagcaactcaataagctggtcgacctcttcggacgtggtggcccagctcgtgcagatgcgcatcacggtatgcgtatcatcagccttttcagtgaatccaagtttcacgtcacgttcgagccggtcgatggtcggctggtccatcgtcacgaagatctgattggtcggtgcttcgaaggtgagcgtgtatcccttggcgtgcagtgcctcacgaatgcggtcggcggcttcgttggcgttgcgggcgatcttgaagtacaagtcgtcagtgaatagtgcatcgaactgcgcacccagcacgaagcccttggccagcagcgcgccatgctgcttgatacgggtcaggaaatgcttcggcgtgttgtgcttggtgaacacaatagcctcgccaaacagggcacctaccttggtgccgccgatatagaacacgtcggcgatgtttgccatatcttccagcgtcatatcgctgccggtggcggtcagtgcatagccaagacgtgcgccgtccacgaacagcggcatgtcgtacgtatgcgccacgtcggcaatggcctgcaattcggccttggagtagatagtgccgtattcggcgctttgcgagacgtatacggaaccggggaacaccatgtgctcgtagttgccgtccgcatagaaggtcttgcagaattcgtccaattcggccggatccatcttgccgttgtggtggggaatcgtgagtaccttatggccggagaactcgatggcgccggcctcatgcacgttcggatggccggatgcgaccgtgatcacgcctgcatacgccggtgtgatggtatcgatgacgacctggttggtctgtgtgccacctaccaggaaccacacgtccgcatccggctggccgcaagcctcgcgaatcttcgccttggcctgttcggtaagctcgtcggagccataacccgaatacagatgattgttggcttcggccacggcctccagtacggcagggtgggcagcgcgggagtaatcgttctcaaaagacagcatgatggacctttatgtccttgggtttggtgaagtggacagccccgagtgtacaacgtgggggtgcgcagaaaaaacaaaagacccttccatgaacggaagggtcttgctggggtggccaacgcggctcgaacgcgcgaccttctgaaccacaatcagatgctctaccaactgagctatggccaccatggtgtttgactcggcgcgcaaagcgctgaattagcacaacaggtgaatactatacacaatcctgtggaaaatgtgcgtgccggtgtgttgcgattgtggctcatcgcgttctcgcccgtcgaaggcattgttcttttgcatctcatgccttgggcgtggacatgcgagcgttcacgatgcgaacagaattgtccattcttggtcaattccgtttagtttcttgcgatgttacttccgctgctgatgcagctgctggcctcccagtacgtgtccgtgccggtcgagtccctgttcctcaacgccgtcaaggtggtgctcttcccgatcgccctcggtgtgatctgccacatgatcttcggcaagaagatcgaaaagattaccgtggccctgccgatcgtctcccaggtggccatcctgctgatcatcggcgtggtcgttgccgccaacggcccgaagttgttcgtggccagctccctgatggccatcccggtggtcatcctgcacaacctgtgcggctactcgctgggcttcggattctccaagctgatgtacaagatctacccgaagggcttccgctacgcacagcagaaggccatcaccttcgaagtcggcatgcaggattccgctctgggtgcaaccctggctctgacctcctttgcctccaacccgattgccgccgtgccgtccaccttcttctccgtgtggcacaacatctctggttccatcctgtccagctggtggcgcaaccacgatgacaagcacgaggtccactgggattccgacaatggcgagaagggctctgccaagaacgtcgcgaccggtgatcacccgttcgatgctgacaagaaggcaaccgctgatgccaaggtcgaaggctgattttctcagctgaaaaccgactgcgcaataaccgctcccacttactcccgattactgttttgggcgtttcgcaggggcggttttgctatactataagtgaggaaacggcaaggtgatacggcaaagaggccgggccgcaaatggatgttcccattggatatggaagagcacatggacgtgctagataacacagttggtatgtggtgaatgatggatagctgaacctccttggcggtgcccccgtgcgacatagtctccgcgggggcacctgctgtgtgaggcagagtgtggggcaaatactctccggcgcgtcgttgtccggcgaaatcgtagtattgatatttgtgtgtgccaacggcatgccttatgtaataggtgtgcgcgctgggatatccttcaaaccgctgatcgcacgcagcaatgcgccgacgggaggggagaaggccatcgggccggtggactgggctatcttttccgattcgtcggatgccgtcagcagacgagcgtccggagagctgagaagtgtggcgcagtgcggcggtcacacgaaagcaagagaaaccactgaatcggagaattcaagttgcctactattgaacagctcgtccgtaagggacgtcaggcaaagccgaagaagtccaagactttggccctgaagggaagcccgctgcgtcgtggcgtgtgcacccgtgtttacaccaccaccccgaagaagccgaactcggctctgcgtaaggtcgcccgtgtgcgcctgtcctcgggcatcgaagtcaccgcctacattccgggcgagggccacaacctgcaggagcactccatcgtgctcgtgcgcggcggccgtgtgaaggatctgccgggtgtgcgttaccacatcgtgcgtggtgcgctcgatacccagggtgtcaaggaccgtaagcagggtcgttccctgtatggagcaaagaaggcgaagtaagagatatgtcacgtaagggaccttccaagaagcacgtcgtgctgcccgatccgatctacggttccaccgtggtggcgcagctcatcaacaagattctgcttgacggcaagaagtcgatcgccgaggacatcgtgtactccgcgctcgatatggtcaaggagaagtccgaccaggagccggtggctgtgctcaagcgcgccctggacaacatccgtccgtccctcgaggttcgctcccgccgtgtcggtggcgctacctaccaggtgccggtcgaggtcaagccgaaccgcgccaacaccctgtcgctgcgctggctgaccgatttctcccgcgcccgtcgtgagaagaccatggccgagcgtctcgccaacgagatcctcgatgcctccaacggtctcggcgcttccgtcaagcgtcgcgaggacacccacaagatggctgaggccaacaaggccttcgctcactaccgctggtagtcttaagccccctaagaaagctaaggaaaaacgatggctgaagagatttcggacctccacgacgtccgcaatatcggcatcatggcccacattgatgccggcaagaccaccactaccgagcgtattctgttctacaccggtaagaactacaagatcggtgagacccacgacggcgcctccaccatggacttcatggcgcaggagcaggagcgtggtatcaccatccagtccgctgctaccacctgcttctggagccgtcagtcccacgacaccaagggcaagttccagatcaacatcatcgatacccctggccacgtggacttcacggccgaggtggaacgctccctgcgtgtgctcgatggcgccgttgccgtgttcgacggcaaggaaggcgtggagccgcagtccgagaccgtgtggcgtcaggctgacaagtacggcgttccgcgtatctgcttcatcaacaagatggacaagctcggcgcgaacttctactactccgtcgacaccatcaaggagaagctgggcgctactccgatcgtgatgcagctgccgatcggttccgagaacgacttcactggcgtcgtcgacctggttgagatgcaggcctacgtgtggaacggcaccgaggagctcggcgccaagtacgacaccactgagatcccggacgacctcaaggacaaggctcaggagtaccacgagaagctcgtggaagccgctgccgaagccgacgacgagctcatgaacaagttcttcgaggacggcgacctgtccaaggaagacatccgcgctggcgtgcgcaagctcaccatcgccaaggaagccttcccgatcttctgcggttccgccttcaaggacaagggcgttcagcctatgctggacggcgtcgtcgattacctgccgtccccggaggacgtgccggccatcaagggctacaagcctggcgatgagtccgtcgagatcgaccgcaagccagtcaagaccgatccgttctcggctctggtcttcaagatctccacccacccgttctacggcaagctcgtgttcgtgcgtgtgtactccggttccgtcaagcccggcgattccgtgctcgactccacccgcgagaagaaggaacgtatcggcaagatcttccagatgcacgccgataaggaaaatccgatggagcaggctgacgccggcaacatctataccttcgtgggcctcaagaacgtcaccaccggtgacaccctgtgcgccatcgacgatccgatcaccctcgactccatgaccttcccggatcctgtgatccaggtggccgtcgagccgaagaccaaggccgaccaggagaagatgggcatcgccctgtccaagctggccgaagaggatccgaccttccaggtcacgaccgacgaagagtccggccagaccctgatcgccggcatgggagagctccagctcgacatcatcgtcgaccgtatgcgccgcgagttcaaggttgagtgcaaccagggcaagccgcaggttgcttaccgcgagaccatccgtaaggccgttatggaccagggctacacccacaagaagcagactggtggttccggccagttcgcaaaggtcctgatgaacttcgagccgctcgacaccaccgagggcaagaccttcgagttcgagaacaaggtcaccggcggccacatctccgccgaattcatcggccccatcgaggctggtgtcaaggaggccatggagtccggtatcctcgccggcttcccggtcgtgggcgtcaaggccaccgtcaccgatggtcagatgcacccggtcgattcctccgaaatggccttcaagctcgcaggttccatgtgcttcaaggaagctgccccgaaggctaagccggtcatcctcgaaccgatcatgaaggtcgaagttcgtacgccggaagagtacatgggcgatgtcatcggcgatttgaaccagcgtcgtggcaacatccagtccatgaccgacggtgtcggcgtcaaggtcatcgacgccaaggtcccgctgtccgagatgttcggctacatcggcgacctgcgttccaagacccagggccgcgccatgttcaccatggagatggactcctacgacgaggtgccgaagagcgtctccgaggagatcatcaaggctcagcgcggcgagtgacacgcgcctcacgatgaagtagccagtgtcgccagtcagcggtaacattctgtaccgctgactgggttctggctcttcaaagtggcacataacccagaaacccagtagaatagagcgagtgcctgcgcgaaagggtgcaggaaactcacgagacgtccaggaggacaaaagtaatggcaaaggaaaagtacgagcgtactaagccgcacgttaacattggtaccatcggccacgtcgatcacggtaagactaccctgactgctgccatctccaaggtgctgcacgaggagttcccggatgtcaacccggagtacgacttcaaccagatcgattctgctccggaagaggccgcccgcggtatcaccatcaacatcgcccacatcgagtaccagaccgagaagcgtcactacgctcacgtcgactgcccgggccacgccgacttcgtgaagaacatgatcaccggtgctgcccagatggatggcgccatcctcgttgtggccgccaccgacggcccgatggctcagacccgcgagcacgtgctgctcgctcgtcaggtgggcgtcccgaagatccttgtcgccctgaacaagtgcgacatggttgaggatgaggagctcatcgagctcgtcgaagaagaggtccgcgacctcctcgacgagaacggcttcgaccgcgactgcccggtcatccacacctccgcttacggtgctctgcacgacgacgctccggaccacgagaagtgggtccagtccgttaaggacctcatggacgccgtcgacgactacatcccgaccccggtccacgacctcgacaagccgttcctgatgccgatcgaggacgtcttcaccatctccggccgtggtaccgttgtcaccggtcgtgttgagcgtggccagctggccgtcaacactccggtcgagatcgttggtatccgtccgacccagaccaccaccgtcacctccatcgagaccttccacaagaccatggacgcctgcgaggctggcgacaacaccggtctgctgctgcgtggtcttggccgtgaagatgtcgagcgtggccaggttgtggccaagccgggctccgtcaccccgcacaccaagttcgagggcgaagtctacgtgctgaccaaggacgagggcggtcgtcactcgccgttcttctccaactaccgtccgcagttctacttccgcaccaccgacgtcaccggcgtcatcgagctgccggaaggcgtcgagatggttcagccgggcgaccacgctaccttcaccgttgagctgattcagcccatcgctatggaggaaggcctgaccttcgctgtgcgtgaaggtggccacaccgttggctccggtcgtgtgaccaagatcctcgcctgattttcatcagacaagaatcttcgcttgaactagcgttatagaaaatccccttcgaggaaactcggaggggatttcctataaccgcagcaggatatggatatgtaccacgacttccggcctggatgcgctagtgttgctttccaatagataaacggactgctgcactgcgagggtatgacactgatggcaggccgggaaagaaggtcgatgatgactagtgcacaggcttctcactgtggttccgtatccgcaatttcactgggactgcctgtttccacggcgattccggaggccaagggcatattaccgaaggctctgttcgtgggcaaagcgccgatttccggcaagcttaagcagcggtttgtgaatgagattgaatccatcaccatgctggccctggctcgttctgccaacactggacttgcggatggcaaactgattccagaagtgttgattatcggtcttaaacttacggctaaagccactgaaataccttctgaagtcatcgaacttattgccggacaacgcaagtcgggcattgtgtttgcatgtgtgcgcgaggtgccgttcgaaggcagaacgcgcgaggaatgcgcgttcgcggtgcgtcgtgcacagccggggcgtgccggacacacgcttatttatcacgtgtatgcaggcgactggcagccggcaggggagtgccagcttgagttgaccggctccaccattgatgaactgtgggcttccttgtgctcgcaagcgattttgggaaccacggacttcgagaatctggatgcacgcatcgtgcagcatggcgagatcgcgcgactcgaagccgatgttgacaaacttacgcgagatcatcagcgtgctaagaatccggcacagcgtaacgaaatttacgccaaactccacaaggcaaagacgcaattagcgcagatgcgcgaagtataaggcgttacagttgaaccatgttcccattgcttgagaccctggtcgccgtatatgaggtgggccagttcacgttggctgctgacgagctgaaagtgtcgcagtcgacggtgtcgtcgcgcatcgcccaattggaacagatggtcggggctccgctgttcgtgcgcaatgcgaaaagcgatgtgacgcctacgcaggccgggcggatgctgtatcagactgccattggtattgatggattatggcgtgatacgcgcgagcagattgcccgcgtgcaggaggatcgcgagccattggcggtctcgttctcgcatacgaccgccgcaatattgcttcccaaggcattgccggtcatggcccggaacatggatgggttcgattttgccgtgcagatgatgaactcggacgccattcttgaccaggcaagcatgaaagccgtgcatttgggcgtggtggaaaagccgatcgtcaatgattcggtggatcgtgtcaccctgtgcgaggaccggctggtcttggcgggagaaccagacggcgtatggatggtgcgcgagcacggttccggtgtgcggtattacacggatttgtatttcaagaccatgcagggtttgccgcctcgcaccatggaggtgtccagcaatgccgcgattgcggcggcgttgtcttccggctttgggcagtcgctgatttcggaagccgcagtgccttctggagtgccggcgcgaaagctcggagacgaattcgtgcgccgtttctatgccttggtgccgagatccggcctgacgcacgatcagcgagagctggtggaagcgattatcgctgtgttgcgcggatagtcagtgccttgtctcccgtcagaggggagccagaatgtggtatcggcaaaatcaatgatatgtattggtggcaatgatttgaccgatgtaaacacttgagattcaatagacaccatgagagagttctgtacaaaatggtggaagcgcattgccgccgttgacatgttgttcattggcgttctgactctgctggcttcgctgttcgcctcctggctcaagcagttccccggattcagcctgttcggcgcgcttatcatcgcgctgctcatcggtatgatcatccagttcccgatccgcagtgcctacgtcggttccaatgatggccgcaaggcaggcgtcaaggacgccgctggcctgatttccaacaagctgctgcgcctcggcatcatcctgctcggtttcaagctcaacctcgccgtgctgttcacgcagggcatcaagtgtctgccgatcgccgctgtggtcgtcacgctgaccatcatcgtgtgctatgccatcgcccgcaagctcggtgtcgacccgatgctcgccatcctgaccgccggtggcaccggcatctgcggtgcggccgccgtcatgggtctggccggttccatcaaggtgtctgaggacaagcaggatgagaaggacaacgacgtgaccatggccgtggccatcgtagccattatgggtactgtgttcgcgttgctggagatcgcgctcggcccgctgaccggcatgaccaaggaccagctgggcatcaccgccggtgcttccctgcacgaaatcgcccacgcggtcgccgccggcgacgctttcggcgcggtggacatcgccaccatcatgaagctctcccgcgtgctcatgctcgtgttcgccgccatcattatcgctatctggtgggagaagaagcactctgaggtggagaacaccggcaagaagaccgtggccttcccgtggttcatgctcggctttatcggcgcttcgatcatcggcactttcgtgccgttcatcgccttcatcaccccgcagcttgtggacttcgcgtacatagtactcggtatggccatggccgcgcttggcatcaatgtgaacttcaaggccatcgcttccaagggcaagaagcccatgctcgccagcttcctgacctcgatcctgctcatgtgcttcgcggcaggcgtcgcggtgctgttcttctgatctgataagtgctctgaaatatgaataggaggcatatgaatgagtcatatgcctcctattcgttgtcatgatatgtcggtgcaatcagtcggcgcgatggtatccgcgttgactgaggatgttgtcgtgatgattgccatgagtgttctgcctagtcgttgaggatatcgcacgttgcatgccgatgatggcgaaggcgattaccaccatgattacgaacgccacagcgaaccagccccatagcagcacgaacagcgccatggaacgggtgaagttgctggacgatttgaatgtcacgttgcggttcatcacgaagttgtaggtcgccgaacacaccacggcgatgccgttggcgatctgtgagggtacgccgatcaagtgcagaatggcgaacgtcgcatactccacaatggtctgcgtggcggaaacacccacatgcttgcccaacacggcgagtccattttgcttcggggttgccgtgcccacggtattttccgcagtattcgttgtggtcgaggtatttgtggcgcccacaccttgattcggcttcacatccgctccattgttcgccatgcccatatacctcccggatgtacctgtgacgttcgacctcgcaatgataccgctgaccgcgtcgggaatcggcgtggcggtcagacgagaaaaccgcaggccgcagcaacgaccggcacactcagcgacagcaccagataggccgctgtggtggggtagcggtgtttgcggaagagcgtcaccatttcgttgattgcggtcgagaacgtggagaagccgccgagaaaaccggtggccagcactagccgccatggttcatcaagtgtcccgcctagggccagcgccgcgaccaaaccggctaggaatccggcgatgagattgatggtgaacgtggaaagtgggaatgcgcgccgccagtacgttttgatggtcacgtcaagcagatagcggcaggaggcgcctacgccgccgcacaggcagaccaagattggtaggaatacggtcatcacgccttacctcccttgctggtcgtagcggcattcgtatcagcggacgcttcggcggatacgttcgaggggccggccagatgcgttcctgcccacacgccggcagacgcacaaaccagacccagcgcgaacgtcaccagtagataggcaatgccggccgccacctgaccgtcgcggattgcggtaaaaccttccagcgcgagtgtcgacatcgtagacaaaccaccgcatacgcccatgccgagtccgcgactggcaagttctttggaacgtgcaccgaaccgggaagcaccggccaagtaagcggtcagccctgcatagcagaagcaagccagcatgttggccacaaacgtgccggtgtggaagctgccagcagcggaaatctgcgcgaacgcatagcgaatcgcggtgccgatagtgccgccgcagaagacgaccaacacaatatcaagatgaatatcggggagcttgcgcgccgggggagtggtcgtgtgcgtaatcggccgggcacctgcagatggggattgcgaacccatagtagcctttcctgaaaccgctgaatcctgctgaagacacaacgatttcatgcaatgtcaaatcgtgtgtaggaactatcagcagtgtgcggttcgaaacaagttcaggcgggtcccatcgccgaatcccagcctactcgtgcagaagacatccatgggcgtgtcgctgttttacttcaagtacttgaggtttttagagttgtcgatatgagcacaacgaccgcatggcatacgattcgcgaggcgtcgatgatttccgggcttccggagtccacgctgcgctactacgagcagatcggcattatcgcccccatcactcgcgacccgagttcggggcatcgcgcctattcggacgccgatctcgaacggctgaccacagtatcctgtctcgcagccacgggcatgccgctcgaatcgatgcgcacatacctcgccaactcgcagggcgggcgagaaggtgcacgccgccagatggaactgctcgacgcgcaggccctgcgtctcgctgccaaagccgaatccattcgaatgcggcaggcgtacgtatcgttcaagacactgtactggcgggctaaggctgaggggcgcgacgaggaggcgcagcagctcatcgaagaaaaccggaacatcatcgaacaggtgaagcgcctgcaaaccgacgtcaaacaataaacgacaatagacagatattcccaacaaaggagtgattgacatgaccgaaatgatgaaagccgcgattttcgtggagcctggcaagatggccgtggaagaagtgccgaaggcgacgcttgaacaggatgatgacatcgtgattcgcgtggtgcgcacgtgcgtgtgtggctctgatttgtggttctttcgtgggctgagcggacaggccgcgcacagccaggtgggtcacgagtccatcggtgtggtcgaagaggttggcgcggcggtcgaatccgttaagccaggtgatttcgtggtcgtgccattcccatacagctgcggcaagtgcccggtatgcaaggccggcttcgaatccgtgtgcccgcacggcggctacttctccgcttgtcaggccgaatacctgcgtgtgcccgaggcggatggcaccgtggtcaaggtgcccggttcaccggaagattattccgatgaacagctcgcatcgctgctgaccatttccgatgtgatgtccaccggttatcacgcggcggcttctgccgaggtcaagcccggtgacaccgccgtggtcatgggcgatggtgcagtcggcctgtgcggtgtgattgccgccaagatgcgcggtgccacgcgcattattgccatgagccgtcacgaggatcgcgcggcgctcgcccgcgaattcggtgcgactgatatcgtgccggagcgtgatcaggctgccattgacaaggtgctggagatgaccgatggctacggcgccgacgctgtgctcgaatgcgtgggctccaagcagtcgttcgatacggcgattggcctgatccgacgcggcggcgtgatcggccgtgtgggcctgccgcacgatgtggagatcagcgccgaaggcacgttctacggcaacatcggcatcaagggcggaccggctcccgtgcgccactatgaccttgatgagggtctgctggacgcggtgctcaagggcgagatcaaccccggccgcgtgttcaccgccgagtacgatctcgaccatatccaagacgcctacgaggcgatggaccagcgcaaggtcatcaaggcgctgattcggttctagggtcgggcgcgcagagaacggttctcgttaagaaccgtgtgagcaattcgcccaaaaccacacaatcgaacatcaaggggatgcccggaattgcaacgtttcaggcatccccttgtttggtttgccgagataaaggctcacatgtttcttattgagaactgttcgctgaaaacgactacttggcgagcaacgccttgtactgctcggtggcctgagcgagggtctcgtcagtgatgccgaaggcgccgtacgtggcaaacggcttgagccaggttgcgccgatgcgaagcctacacggggtgcaccgtcagcgaaaagtcgccgatggtgctgacggtcgagggtgaggcaagattgcagacatctcgcaagcagtacgtggcatacagcggaagataggttgttctgccgtcctgcacgatattggagcgggacaacaccacgccctgcgagacgtgatattcggcattggccaatacggcgtcgatggcggcgtgcgtgcggtagcttcgccccgacttgacctcaaacggcatcacggaatcggcgtttgtgtcggcgatgaaatcgacttcgccatgtttcttcgccatgtagtaatacagcggaatgccttgtgctgtcagctcctgagcgattacgttctcgtagatggcgcccaggttcggggacgaatcatcgagatatgcggcctgagcggttggctgcggatatcgtgccataagcataccggtatcagactgatacagtttgaacttcggcgattgcgccgtgcgcctcaatggcgatttcggttcggtgacgcagttggttttcaatgcaacgcccgcgtcaacaagccagagaaaatccttctggttgcgatcgtaccgggcaccggggctgatggaggagacggcgaatctgccgttgccatcaatcagctgggtggggagctggtcgaagatctcctgcacttgcaatgcacgattgcctgcgtactgcgagatatcgtggcgatattgtcggttcagctcgttctgtaccgcgcgcacggccgccaaatcgcctttggtgtccaagaaacgctgcacgacttccggcataccgccgactaccagataggtgcggaagttcgtcatcatcgcatcgtgaatgtattgatcgattggcgtggccgactggcaggattctcggatgctttcaagtgtcgtcttctgtacgccgatggcccaacagaattcctcgaaatccatgggacgcatggttttttcgatgaccgagccaacggggtaggagcgtacgcccttgaactcggtgccaagcatggagccggagaatacgtaatcgaaacggccgtcagccatcagaaacttgaccatggtcatcacgtccggtgcttcttgcacctcgtcgatgaaaaccagtgtatcgccggggatgagcgtcgaaggtgaaaacaaggtcagacggctgatgaactcctgcacgtcgttcgcagatgcgagcgctttggctgcttgcttgttctcgtacaggttgatttcaaggtaatgggtgtattcgtgtttggcgaactcgcgtactgcgtagctcttgccgacttgacgggcgccggtcagcagcagtgctttgccagtgccgttccgcttccattccagcagatcgtccgagattttgcgctcaagcatggcagttcctttccgaatcccttacgagagtaacattttctgccttgtatgtgcaaaattccgcatttcagaacgtggttttggtgcaaaataccgaattttaaagtaggaatttggtgcaaaatgccgtgcaaatggtgaatctgacgttctcgtatctgggcggactgatggccctgatggtcgcgctggcgatcccgggtttcctctgctggctcggtgcagggcctctcgccaagcggatatgcaagatcatgaccgagcgcaacgagccggcaatcgaccatctgcatggtgtgaacttcgacgtatgccggcgtgcgaactccctgttgatgcgcggcgacgacaccggtggtgccgctgatagtactgatggcagcgagagcaagacgctggagcaacctgaaatatattgaacctttgaggaagtggaaggggatggatatggcaaccatcatggtcgtggaggacgagaaggaactcaacgacatcatgtgcatgtatctgcgtgacgcggggtacacggtgtacgggtgtctgtcggtcaacgaggcgtatacggcgatgcatgggcgaatcatcgacctcgtgatttcggacattatgatacccggcctcgatggggtcgagttcgcggcgaaactgcggcaaatggatgatcatctgccgattatcttcgtgactgcgcgtgacgacatggcttcgaagaagcacggtttccataccggtgtggatgattacatggtcaagccggtcgaattggatgagctggtgctgcgcgtcgaggcattgctgcgatgtaccggcatcgaggaaagacacctgctcaaggtgggtggactgatgcttgacgcgggggagatgtcggcccaatgggacggtaatccggtcgagctgaccgtgcgcttgccggcagtgcagtaaggcgccatcagcgaagctacttgtgaattcggaatggggccgcaggcaggccaaaagcgttgaacagcggtgccgggccccaactgaaccagccgtaacgtgcgcagatcggatgcgataccgcgtcggcatgaagcaccacggtatcggcctcgatccgtgcgtccgcacggtgatagatgccgtccgatccagcgatttcgaagccggaagccgccgcgtcgcatcgattcacggtccacaagggttctgtttccccggattcagacgagtggactgccggtaggtgaccgacatcgtcgctcccagaccacggtccgaaatgcaggccgtcggcgttgtcaaaacgcacctgcagctcatcggccgtttcgccggcggatgccagcgaaacgaatgcgggaccatcggcgtggacgggaagaccatagacatgggcttcggcttgcagcgcaatgcgctcaccaaccggacgtttgtcggtcggatggatgttgttgaactcgccggtatcgaacgtgaccgccagatacacgtcgggaatgatacgtgctgcatcggcttgtgcttcgcggatatgaggccagaacatgcgatcaatgccgctgttgtattccttctgatcgatccaacgtggcaattgcacgatgatgaacggcagttccgcctcgtttccgaccgatgcggcaggcgtgtcggcgattggttcggcaccgtggccgcgcgcggcatcatcggcgactatccgccccacatcgtagctatcactgaaatcgccgcctgcgcgccggctccacaacgtccgccattcaccgatcatgcaacccagcagttcgcgatacgaggcgtaccgctgctcgtcctcttcgccttgataccacagcacgccgcgcgtggagaacggggccaaccggcgcaccatcgcgttgaatgcgccggtgacgtgatattgggagaacggggtgacgggcggcggccacgggcactcaccgtaccgggcgttgagcacatcccacgtgatgtccggtactgcagcctgtgcggcggcgatctgctcattccacgcattgaaggtgcattgccaggagtcggtttcgtcgtggaactgctgatcggttttgccgtcgatctgctgatggtagcggtcaagatagccgcgcccggcctcggtggcggtgagcatgtgttcgctcatccacgaggtgatcgacgtaccgccgatatagcaatcgacgataccgaccggtacgtcgggtcccaggtcccgccgtagtttgcgtgcgaaataataggcgattgcggacatcgtgctgcaggaatcgggggagctggctcgccaggccgactggttctcggccgcgataagttcgctgtccaccacgccgaacttgggcacattgaagaagcgcagcagcggatcatcggatgcggcgatggccgaatccgcatcacggtcgttgtgcagttcgaattcgatgttgctttgcccgctggcaatccatacttcgccgaccatgacgttaaagtacttaagcgttacgctggtgcggtcggagatggtcagcgtatacggtccaccggcttccagcggcggtagcgtaaccatccaggtgccgtccggggcgatcgatccgatggcgctgacactgtccgtgatggagcgcgatgattgacggcgaatcagtgcgctgccatctgccgtgctcagcacggtcacgacgggccgtccaggcgtgccggtgccgaacaatacgattggcttgccgcgttgcagcaccatgtcatgggagaagatggcggaaggccgaaactcggcggtgccgattggcttgttccgtgcggcttcggctgcgctttcgtccacgccgctggcgttggcgccgggtgccgggccggtggccgtctgtggtgatgcgctcatgtgagttcctctcttgatggtaagcggcgggtcccgatgggttgcctacggtggtcagtcccaaatcgcagggccgagggattcgatgaaggcggtgagctcgtccgccatctcctgatgttcggcgatgcgcgggtgaccgggcgtggctgaaccgttgcgcgaatacaggaagtggtgcaccttcgggtccggggcgatgccgttgttgcggtcgccggttgagacaacacgcacggcgtcatcaattgcctgatcccaactggcgtcatgctgcagtacggtggtggcgcagatgatggtggcttggagatacttgcctcgcaacgttcgcaggaaatcgacgtatcgcgcccgccattggaccgactgctcgccctgatagtccgctgccatgaaatcgactggatgcgcatcgttctgtccgagcgccacaaccacgacctgcggggtgtagcgtgagaaatcccatggcttggttccgccgaggaacgggttgtattcgatgcggtcccagatgctttccatgcccacgtaatccggtccgcagaaccagccgatgccgtccagcagcgaagcaccgccttgagccacgatgttcactgacgctccgagattgcgcgcggtgatggccgcataggaataccacgaattgctgtaggggctcagatccgtatccggatcggccttgccggtgtacagcgcggcttcgttgcgttcgccgcacgatacggaatcgccgtatacctcgatgcgccggatgggagcaggtgtggccggcggcaacacccgggcctgatcgtcaatgagaaagccggtaatctccagatagtgctcgccatcctgacgcttatagactaccacctcatgttcgatgtccggcagatgttcagcgagcatcacggtggtttctgcgtcattctcggtgatgcgcgcccgataaggcacgccatcgatcaccgcgccgagtgtgctgtcgccatagttatggcgattgatcagtcggacacccaccgaagtgccggtgcagcggaacgtggcctgcgtgtaggggaacacccataccgggcggtccgggacgtcgatatcgatgcggcccatggtcctaatcacggggttgttgggagtgatctgctgcatgctgcttccttgcttggtgtgggtcttggcggaaaggtgccgtctggcaggcgtcggcgtgggggggggggcgagtccgttctcctcgacatggttccaaaaccgtacgcaacacagcgacttaaccgcttcagatttcatggtacactattgcccaacgatccgagatatgcaagacccgcgtgtcgcggacacggtgagagcccgacatatgacccatattccctcgctgtggagggtaatcttccacacaccgatgatggccagacaaaggagcaatatgaccatgatatttcccgaaggattccagtttggtacggccacggcctcgtatcagatcgaaggcggcgccaccgagggcggccgcgcgccatcgatttgggacacgttctcccacacgcccggcaaaaccgtgaacggcgacaccggtgatgtggcctgtgactcctaccatctgtggcacaaggacatcgatttgcttgccgacctcggcgtggactcctaccgcctgtccgtggccatgccgcgcgtgatgccgaccgaagacggcccggtcaacgaggaaggccttgattattacgagcgtgtggtcgacgcactgctggccaagggcatcaagcccacggtcacgctgtaccattgggatctgccgcagtacctcggcgacaagaacggttggctgaaccgcgacaccgcctacaagctggccgattacgccaaggtcgtggcccaccgcctgggcgaccgcatcgagacctataccaccctgaacgagccatggtgctcctcctacctgagctacggcgccaccgaacatgcgcccggtctgggcctcggccccggagccttcccggctgtgcaccatctgaatctggcccatggcctgatggctcaagccgtgcgcagcgaggtcggtgccaagtcgcaactgtcggtcacgctgaaccttcaatttaaccgtggcgatgccgacgccgtgcaccgtctcgacctgattggcaaccgcgtgtggctcgacccgatgctgcgcggctactatccgaacgaactgttcgccatcaccaagggcatctgcgattgggagttcgtcaaggacggcgacctggaacagatccaccagccgctggacgtgcttggcatcaactactattcctccggcttggtcgctatgagcgatcgcccgcagttcccgcagtccaccgcagcctccaccgcgcccggtgccagcgacgtcgactggctgccgacgcccggcgaacacaccgacatgggctggaacatcgacccgaagggtctgtacgacctgctgatgcgcgtgcacaacaactatccggagattccgctgatgatcaccgagaacggcatcgcggtcgagggcggagatagggtcgtcatcgaggcggatggcaccaaggccgtgcacgatcccaagcgcatcgcctacctgaagcggcacttcgaagcggcgctcaaggccatcgaggacggcgtggacttgcgtggctacttcgtgtggtccatgctcgacaacttcgagtgggctttcggctacaccaagcgcttcggcatcgtgtacacggactacgagaccgaggaacgcatcccgaaggatagcttcaaatggtacaagcggctgatcgccgagcatgccatccctcaggagcagcggtgacaactgcttgactgaataattaagtggttcagtacaatactgtgaaataacgtatacggaaaatgttgcatccgataacaaatctgatgcaacatttttttgtaaaagtaagtaactgcaatattttttcaagctgtagggcgcgtagtgtgagttgtgacaacaataagacacgcgcgacgcagtcatggttgatttacgcaaccgcttaagttatcatcataattacttaagcggttgagttacagtgccgctggagattgccggtgaagaagccggcaaaggagaatcaagaacaatcgaaaggattgacgatgacgtcgaaagtgagaaagggcatacggcgcacgattgcagcgctggccgccatcgcttctctgatgtctgtctcagcctgctccggtgggtcgaacacggcagctgacggaaccgtggtcagtatcttcaacggaacgaccggcacgttcaacgagaacttcaacccgttctctcccacagcgctcggtcccacgctgggcgtgatctacgagaccctgtactggtataacctcgcttcggatgaggatccgaccccgatgcttgccacaggctacgagtggaacgaagacggctccgagctgaccatcaccacccgaaaaggtgtcaagtggcaggatggcgagccgttctccgccaaagacgtggccttcaccttcaacctgattcacaacaccccggccctcaacaccaacggcacggcctgcaccgccgaggtcatcgacgatactcacgtcaaactgatcttcccgaccaagaacgcggacggcaccgaattcgatgagccgttcaccggcgcatacatgcaggagggtggcatcctcggcggccaggccatcgtgcccgagcacatctggaagaacgtcaaggacccgatgaactacaccaatgccgacccgatcggcaccggatcgttcaagctggataagttcaccaatcagtcctacagcttcaaggcttttaaggactattggaacggcaagccgaagattgacggcgtgcgttatgtggccctgaacgacgcctccgcagccaccagcacgctgatggccggacaggtcgactggatgagcgcctacatccccagctacaagatgttgctcaagaactacccgcgcatctccgccgtgaacacgccccgcctgaccaccgtggtcatgacctgttcgaacgccgaagccgggtgcaaggggcctcagaccgacacggcagtgcgccaagccatttattacggcatgaatcgtacccagctcaacgcccttgccggcgccggctcgggagctatgggctcgcccaccatgctgatgccggaccgcgacgccaaatggatcaccgacgacagcctgcaatacacaccggaaaccggcgacgcggacaaagccaagcagatcctcgaggacgccggatggaaaatgggccaggacggctaccgttacaagaacggtgaaaagctgagcatgaccatccagacagtggccggatggtctgactacatcctgatcaacgacaccctgaagcagcagctcaagccactcggcatcgaaatcgtctcctcccagatggcgtggaaccagtggaacgaaaacgagcagaagggcaactaccagctttcgcttgactcgcttggactcggcgtcacctcagatccgtattacacgtacagcccgcgttacaccactgacaacatggccaaggtcggcgacacctccggcggtcagaactacgcccgctactcaaacccggtcgtcgacaaggcggtcgccaatgcggcggccaccgaggacgaggccgagcgcaaggcgcagtacgccatcgtccagcaggagatcaccaacgacgtgccgtacattcccgtctatatcaactcgatgctcaccgaattcaacgactccaaggtaaccggctggcccaccgaagacaacatgtacgcgctgcccgccgcatggaaggcctgggatatgggcatcatcctgcagcatctcgaaccgaagcagtaaggacaaatcatgaaatacgtcttgagaaaactgggattttacctgattgctctgtgggccgcgctcacactcaacttcttcctgccgcgcatcatgcccggcaatcccgtcgaccagctgatttccaagctctctcagaagggccaggtgactccggccacccgtcatgccgtcgagctgatgcttggttccgattcctcggtgccaatgtggcagcagtacctcagctacttcggcaacatcttccgcggggacctcggtgtctccgtgacctacttcccaaattctgtgtcctccgtgattggcaacaccctgccatggacggtcggtctggtgggcatctccacgattctcgccttcgtgttcggcacgattctcggcacgctcgccggatggaagcgcggttcctggatcgacaacctgattcctgtcaccacgctgttccagtccatcccgtacttctggctcgcgctgatcctgctgtacttcttcggcttgaagaacccgatcttcccgctgttcggcggctatgacgtctggagcgtgaccccgggctggagttgggcattcatcgcctcggtgattaagtacggcatgctaccggccatcaccatcgtgctgtcgtcggttggcggctggatgctcggcatgcgcaacatgatggtctccaccctctccgaggactacatcctgacggccgaagccaagggcctgtcgcgcttcaagatcatgacctcctacgcggcccgcaacgccatcctgccctcgatttccggctttgcgatctccctgggattcgtggttgccggctcgatcgttgccgaatcggtgttctcctaccccggcatcggcttcgcgctgctcaccgccgtgcagaataacgactatgcactcatgcagggcatcttcatgatcatcaccatctcggtgctcggcgccaacctgttcatggatctgatctacggcctgatcgatccgcgcacccgggctcagggctgaaaggaaaggcatcatgtcaaccgcaatatcatccaagacggcctcgaacctgaccgaggccgaaaagaaggaactacaggcgccaagcggcaacaagcgcaagagcaaagccgactcgatgctcccgcccatgactccaaagctggccatcggcctgatcatcgtcggcatcatcgcgttctttgccatcgtcgtgccgttcttcgtccaggacccgaacaaggtaagcgatgtgggcccgaccgcccccagcgccgaacactggcttggcaccacccagaccgggcaggacgtgttcgcccagctggcctacgcctgccgaggatcactgttcatcggcgtgacggtcggcatcctggccgtggccctctccagcttcttcggcatcctcggcgcatacgtcggcggtgccaccgacgaggcgttctcgctgctctccaacgtgatgctcgtcatccccggtctgccgctgatgatcgtcatcgccagctacatgcccaacaaatccgcgttcctcgtggccggcgtgctggccctgacctcttgggccggacccgcacgagtgctgcgtggctacacgatgtccgtgcgttcgcgtgattatgtgctggccgcccgtgtggccggtgagaagccgtggcgcatcctgttcgtcgagattttcccgaacctgattccgttgctcgcatcccaggccatgcaggccgtgattgccgcaattctcggcgaagccggactgtcctatctgggcttgggcgccactgactcatacacctggggcaccatgctttactacgctcagaacggcatggccctgatcctcggcgcatggtggtggttcgtgccctccggcctgtgcatcgcactgttcggcgcggcgttggccctcatcaacttctccgtggacgagatcgtcaacccgaagctcaaggccgccacccgcagccagatcaagaagtggaagctcgaggagaaggccggcaaggcgaagtccgacgccgcattccccgcaggcaatgttgcccatgtcgcagcaaaggagtccgtggcatcatgattgaaaccattcagaacaacgtattgccgccggtatacgagcaggatccggtgctggagattgacgacttctgcgtcgaataccgagctgagaaaaccgtgcaagccgtcaaacacgtcaacctcaagcttggtcgtggcgaagtgctcggcctggccggcgaatccggttgcggcaagtccacgttggcctacggcgtgaaccgtctacttaagccgccagccgtggtcacctccggccgtgtggtgttcaactcgcgcgaaggttacccgattgatgtgcgtgcgctggaaggcgacgacctgcgcatgttccgttgggagaagatttcaatggtcttccaaggcgccatgaattcgctcaacccggtcaagaagatcaaggaccagttgggcgacgtattcaccactcatcgcccggacatgagcaagaaagagcggctcgacaaatgcggcgagctattggaacgcgtgggtgtggaccgcaacaggctcaacgcctacccgcacgagttgtccggaggcatgcgccagcgtgtgatgatcgccatggcaatggccctcgacccgcaggtgatgatcatggacgagccgaccaccgctctggacgtggtggtgcagcgcgagattctgcgtgaaatcacccgtctgaaggacgaatttggctttgctgtcatcttcatcacccatgatctgccgttgctgctggaaatctccgaccgcatcgccgtgatgcgcaagggcgagattgtcgagatgaacaatgcgatggagctctacacccatccccagaacgaatacaccgccaagctgctggacagcttcccgtcgctcaccggcgaccgtggttcgtttattcgcaccggttccgaggacctggccatgggtacctcgccgttcgccaccaaggagtgagatcatgaccacgcttgaattgaaggatgtcaccaagcagtttgacctgcgcgaaggcctgaaaaccatgaagttcacggccgtcagccatgcgagtttcatgttggaatccggtaagacggtggccttggtcggccagtccggctccggcaagtccaccatcgccaagatgattctgggccttgaggtgccgaccgaggggcagattttcatcgacggcaagccggtggaccaccacggacgcaaggcgggccacatcttccgtaagaccgtgcagatggtgttccaggatccgtatgcctcgctgaacccattccatacggtcgaacaccacattgctcgtccgatgaagatccatcatcccggtatgagcaacgcggaagtacacaaacgtgtcatcgaactgctcgaccgtgtacgtctgacccccggcgaggatttcgcctcccggttgcccggcgagctgtccggcggtcaacgccaacgtgtggccatcgcccgcgccctggcccccgagcctagcatcctcatcgccgacgaaccggtctccgcgctggacgtctcgattcgcctcggcgtactgaacctgctggctcgcctgcagcgtgaggaaaatctcggcgtgctgtacatcacacacgacatggccaccgcccgccacttctccgacgagatcatggtgatgcgcaagggcgagctcgtagaacacggaccggcggacgaggtgattctccacccgaaggaggagtacaccaagaccctgattggagctgcccccgacccggaacgtcgactcaaggaacttgcggccgctggacggtagtctccaccgtattagccattcgtaggctccccgattgccgaggagcctacatgtgaatgtaaggacttcttatgaccacccacaccacctacacccctcacaccttcacccctctgaattctggttggacgttcaccgcgctgaacccggaacttgcgcctgaggccttacgtgaccggctcactgctggcatccccgccacggttccaggcgaggccaccatcgacttgctcgatgctggactcatcgaagatcccttcgatggcgacaacgagaacaggcagcagtggatcggtgacatcgactggcgattcacctgcgaatttgactggcataacgacggcaacgaccgccatgatctggtggcctatggactcgacaccgttgcctatgtgtcgctcaatgggctgatcgtcggcaatacccgcaacttccaccgcacctaccgctgggatgcgcgcccctacctgcgcgacggcaagaacacgctttccgtggtgttcatgtctcccgtgcgcttttccgataccgaagaacagcgacgtggctactatccacacaccgagcatcacgccttcaaccagattcgtaagcccagctactccttcgggtgggattggggcatcgacgtggccaacgccggaatctggcgtccgataggccttgactcgtggaacgaggcccgcatcgagtccgtgcgcccactggtggatgtccgcgcggacggcaccggcgtgctgactgtgaatgtggacatcgagcgtgccggtggtggtcgcctgatgtctcctggcgatgtgcactcttctaagccggctgtgccgttcatggtgcatgtcggtggccatgatgtgaacttggaactggccggcgtcatcgcccaagggtgtaacagcggctcgattaccgtcgagattccagacgtggaactgtggtggccgcgcggctacggtgaccagccgctgtacgacgtgcaggtgagtctcggcgagcatggcgaggcacagtgggccggtgaagtcggcttccgcaccgtgcgtgtggacaccgccgccgacgagaccggacgcccgttccagatctacgtcaacgacgtgtcggtgcatgcgcgcggctacaactggattcccgactccgccttcatctcccaggtggacgacgcgcgttacagccgcggcgtcaacgatctggtggaatccaactcgaacatggtgcgtgtgtggggcggaggcatctatgaggccgacgaattctacgcgatgtgcgaccgtgccggcatcatggtctggcaggacttcatgctcgcctgcgctgcctacccggaagacgccgacacccgcgccgaagtggaggccgaggctcgcgagcagatcgcgcgcctgagttcccacgccagcctgaccgtgtggaacggctccaacgagaactatgtggcctactccgaatggtggggctacaagcaggccctgcgcgacgacgacaaggcacccaacgcctacggctacggagaaaagggctggggcgactactattacgccgatctcttcccatccctgctggccgaactcgacccggtgcacgtctacctgccgagctccccgatgagcttcaccaagttcaccgacgccaacaaggacatcgacggaaccatgcacatctgggatgtgtggaaccgtgtggactaccgcaagtacctcgactacacgccgcgcttcgccgacgaattcggctaccaggcgccgcccgcgttcagcacgctcacccgcgtggtgcatgatgacaagctcgaaccgttcggcaagcagatgctcgtgcaccagaaagcctctggtggcaactataagctcgcccgtggcatgcgctcgcatctgacaccgggcaccatcgacgaggtgagctacaacgccgacggcacccgcaactggctgatcgacaccgacaactgggccgatatcgaggactggcactgggcatgccagctgcagcaggcgcaggccatccgcttcggcgtggagcatatgcgctcactggaaccggcgaacgcaggctcactgatctggcagctcaacgacgattggccggtcgtctcctgggccgcagtcgactacgacggccaccgcaagcccctgtggtacgcctcccgcgacttcttcgcgccgcgtctggccacgattcagcctcgcgtctccgacaaggcccgcgaggacctgagctgggaaggcaaccccgtcgcccctgaccatctcgaactgatcgtgctcaacgacacgctcgcgccgtgggccggcacctggacggtgcgccgcatgacgttggccggcgagacgctcgcctcgacctcgttcgacgtgactctcgacacggtcgggcatatcggattgccgctgccggcggacgtctccatgttcggcgatgcgacgaacgagcttatcgtggctaccccgtccgacgacgcctttgcccgcgtaatctacaacggcaccgacgtcatcgaccagaagctcgagcccacgccgttcaaggcgagtgcggagccggcggatgacggctatgctctgaccgtcatggccacgggttacgtgcgtgacctgttctgcatggtcgacaaagtcgattccgcggcctccatcgacggtggtctggcaactttgctgccgggcgaatcggtgacctggcatatcgccagcaatgccacggtagacccgcaagcgttcgttgcggcaaacgtgttgcgctgcgccaacgacctgaagcgctgagcgccattggcctcgcggatctgctggtccggaccgagttcatcggatatcggttcggaccacagtcgatgcggcgctcacggtcttggaaacgccggagccggaaatggtatggcatgattaaatgaacttaaccgtttgatttacgtcgtaggaggcagtatgggtaaggccaaggtcaccatttcagacgtcgcgcgggcggccggcgtctccagcagtgccgtctcgtatgcgctgaacgacaagcccggcgtctccagcgagacccgtgaaaaggtgttgcgagtcgctgaaacgatggggtggaagccgaacagcgctgccaaggcattatccgatgcgagcacacggtcgatcggtctggtgctgagcatgaatcccgaggtgttcgccgtggagtcgtatgcgatggcactcatcgccggtctgggcaccgaactggaaaagcgcgactattcgctgctgctgcgcatcgtgccggacacaagcagcgctttgcgcatccatcgcaattggattgcttccggcagcgtggacgccgccttggtcaccaatgtggaaatcggcgatcctcgaatcgagctgtataaggaacatcccgaatcgccggtgttggtgatcgccgacccatccgtgaccaaagggttgccgacgctgtcgagtgatgaggcccacggtgcgcggcagattgtcgactgtctgcatgagctggggcaccggcacattgcacgtattgccggaccggaacgctttgcgcacacgttcgtgcgtgaccgtactttcaacgaggagaccgtggcgctgggcatgcgctacgattgcctgcactcggactacacgccggagcagggcggagaatgcacctcccgcctgctttcattccccgattcgcctacggcgattgtgtacgacaatgacgtgatggccatcgaaggcatgcgcgtggccttggaacaggggttgagcgtgccggatgacatctccatcgtgtcatgggacgattcgttcatgtgcaccgttacgacaccgtccatcaccgcgctgtggcgggatattccccgcttgggcagccgtgcggtgcctatgctgttcaagcagattgatggcgaaaaggtgtctaacgccaccgaatcaccatatgaattgatggtgcgtgattccgtggcgccccccgtgaacggtgagtgaacagggcagatgagcatcgtggcattgggtgacaactgacgatttgcatggggcaatggcgtggtgtcgatggtgttcgatgccgccagtgatgcaccagtgcgtctggttggtctctctggccgcgcatggctgagatcggcatcgatgtccttgatttttcaagcggttgcggagtcaagcgattaagttactttgacgtactgttacatggcgatacatgacgctttgagcatatttacgtcattcttggcgtgtcgagctaagctcaatgtcttatactgtacttaagcgcttcagttaggcaacgacgctaggtactgtcaataatcgaaggagactctcatgaacacctacgcagctactgcttctactgcccattcctcgggaaagaccgtcgcgaaggcagtcgcactgttcgccgtcggaatccttctcgtcgttatgggcacagctcttgcgacagcgattccggctatcgcggagggggtaatcgggatgacttccattgtccttctctcggcagtggctgtcaccacctatgcctctttggtattcgcggaaatgaaccgatagatattgttcgagctccttgctcatagcacatgaaagggtgaagcaaatgcagaacgtcgaagccaaatatgcgctcggtgcgccggaaaacagggcgtggctcaacgagcaacgcgataatctcatggacttcggtcatgccttcccgtctccgggcggcggctcgtattggctgggcgacgacggtacgccatggaaggaccgcaaccgcgagacgtggatcacctgccgtatgacgcacgtgtactcgctggccgcgttcgtgggtcatccgggcgccggggcgttggtcgacgccggcctgcgcggcttgcgtggcgagctgcatgacgacgcgaacggcggctggtacgcggccgtcacccccgagggcggccacgtcggtaccaagcagtgctacgcccatgcgtttgtgctgcttgcgtcctcttcagccacgctgcttggccgccctggcgcggcagaactgctggccgacgcgcaggacgtgtttctcaatcgtttctgggatgacgaggtcggcctgtccgtggacacctggaacgaggacttcaccgagcttgacccgtatcgtggcctcaacgccaacatgcactcggtcgaggcgttcctggccgtgtcggacgtcaccggcgatgaatcttggcgcaagcgcgcgggccgcatcatcgaccatgtaatcggctgggcggagaacaacgactggcgtatccctgagcatttccacgaggactggagtctcgatctcgaatgcaaccgggacaagccggacgaccagttcaagccgtacggcgccaccccgggccacggcatcgaatgggcccgactgatcacgcagtatgcattgagcgctcccatcgccgattccaagaaggcgaaactgatcgacgtggccgagcacctgttccatcgtgcggtcgcggacggctgggacaccgacggcgcacccggcatcgtctacaccaccgattgggaaggcaagccggtggtccacgaccgtatgcactggacgctcgccgaggccatcaacacctcctcgacgctggcccacgtgaccggcaagcccgaatacgccgagcgctacgccgagttcctgcagtacgccgacgaatacgtcatcgaccacgtcaacggctcttggttccaccagctcgaccgcaacaaccagctgctgaacacggtctggccgggcaaatccgacctgtaccacgccacccagtcgatgatgatcccgctcaacgacccgtcgctgtccatcgcgccggccgccaagcagtccggcgactgaccgggcgttccggtttcgacttgtcttatcggcatacttcctttttcagtgcctataagacgcctataataagtggggccaccgttcgcattgaatggtggccccactggttgctatggagagggctacttcttggcctgagtgagctgtgtggaaagagcgataagcaacgaggcagacactatggcgatggcgcgtatatccaggtgccatatcacgcgatgtggggcgggcatcacatccatttgggccgcaacgtctacattaatttcaactgcacgttggtggatgacgcgcagatcactatcggcgatgggacgatgatcgcgcccaacgtgacgatcgtcgccgcgtcgcacccggtatcgccaaagctcggggcggagggctgcggtatcacatcctgtcagcttggcatggagtgcggtcggcaaggccggataattcggcgatgcgggagatgaacgcgcgaatcaccggggtcgcgtcgagcggatagagcagtccgtagtgcatgatgaccggttcgggccagtccacggctacgttgacgagttgcgggtgaatgccggcccacatcggtttggagatgagcagatcgctggattcggcgcagtcgttgaacgtgtcgagatcgtaatggtcgatgtcgatcagatcgatggcggggtgatgttccaaaagatcccgggccgtgtcgttggcgccgcgatggcgtttgaggatgcggatgcgtgtgccttcgaggtccttcaatgtgagttgtgcgcgtctcgccaatgcgtgattgcgtggcacggccacgcacagcggctcggaatcgagggcgagggtgtcgcaggtgtcatcccaatagccggtgtcgaaggcagtggagatcaaatcgacgtcctcgccgagatgggtgatgatgtcgttgatggcttcggagtcatcgggcatcgacaccagttccaagcggatgtcggtgtgcttgccggcatcgcgctgccataggtcgaggatacggcggccggggcgcaggatggaaacgccaaggcggacggtggcgatgccgtcggcgctgcgccgttgcgcacggcgtagaatctcctcgcattggcgcacaatcatctgtgcgtcctcgacgaactccttgccggctttggtgagttgcacgccactgcgcgatcggtcgaacagcgtcagaccgtattccctttcgaacgtattgacctgtttggccaccgccggcgtggaaatatgcaggagacgaccggccttggcgaagctgccggtctgcgcggcggcgatcaccgcatccagtcttctgtcatacattacgacctccattaaccaatggtttatgaactgtgagccataagtatttgtaaactgctgttttactggtgtctcaaagaatatcatagctactgcaataaccaaacggaaacatataaaccaatggaatataggtgaatatgacatcaatcaacgaatccgcagcgctcggcctcgtatgcgaagacgaaggcctcgagcgtgaggcccgtcgcgcatcgcgtcgctcggcccgctacagcgcagggctgaccacgttcgccacgtcgctggcgttcttcctgaccggcatggacaccatgatcgtcaacgtggccctgcctaccatcaccgctgaccttggcggcgacatggcgttgcagcagtggatgatcgacggctacacgctgctgttcgcctcgttgctgctgcttgccggcagcctgtccgacaagttcggtgccaagcgcatgttcttcttcggcacggcgctgttcggtgtggcctcgctgctgagcaccttcgcctggaccatgctggtgctcatcgtcggccgttgcctgatgggcgtggccgcagccctgattctgccggcgtcgatggccttgatcaatgaggccaatcccgacccgcgccgccgtgccttcgccctcggcctgtggggtgccggctcggcgtccgcgtccgcgttcggcccgctgttcggtggtctgctcacgccgattcactggagtctgatctttgcggtcaacgtgccgttctgcctgatcgtgctcgccctcgcgccgaaggtcgccccctcgcccacccgtgccatctcgttcgactggcttggtcaggcgcttgcgctgatcggcctcgcctcgctggtggccggcgtcatcgaaatcggctccttgggcatctcctcgccggtgacgctcgcgatgctggccgtcggcatcgccgcactcgtgctgttcgtgcttgcgcaggccaaggtcaggcatccgatggtgccgctgaacctgtttcgcaacgacggcatgcgcatctcgctgattgtgggcttcatcatgattttcaactggttcggcatggtcttcatctccaccctgttcctgcaaagcgagcagggcatgagcccgttcgccgccggtctggtgttcatcccctccgcggtggtcatggtggtcaccaacgtgttcagcgggcaggtcatcaactcgatgggcacccggttcaccgtgtccatcggactgatcgccatggccgtcggcttccttgccgcggtgctggtgtcggctccgatgcctgcatgggtgatcgccgtcgctctgagcgtcgtcggccttggcggcgcgctggtcacgccggcgctgtccggactggtgctggtaagcgtggagcagaggcaggcgggtatcgccagcgcggtgttcaacacgttccgccaggtcggcggggcgatcggcgtggccgtgttcggcgtggtcgccaccttcatgccctcgcttgacggctccctgcgtgccgtgttcgtcgcggccgccgtgctgctcgtcgccgcattcgcctacgcccggctgcgctgggctgagtagaggaatccggcaccacgcttcgattccgtgtgagaatatcctcggaccgtatgcttcagtccagcaggaatcgggcgaattccgcggcggccggcgaggtcgcggcctgtttcttccagacgatggccgagccggtctgcaatgcgggggagagcggaacggctcggacgccgggatagcacatgcctaaatcgaggcctaggaaaagacccaatccgttggtcaccatgacgacggcgttgtttgtcagcgagcagtagcctgcgatgttcgccctcgcctgatcggcgtactgcccgaaccagttcagcagcagattgtgcacaggcgtacgcactgggaagagcaacggggcatccttgagattctgtggtgtcaacgattcgcgctctgccaacgggtggctttcgggaaccatcgcgacccagcgctccgtggtgccggtacgcaggaattcatactggctgacgtccgccggatcggtaagcaagccgaaatccatgaggccttgctcgatctgctcctggatgatgtccgacgtggtgctgatcacccggaatcgcacgccgggatggatttcgcggaatgcggccatgcgctgagacagcaatgtcatgccgcgtacttcgccgcagcccacggcgatttcgccgctgagctcgctgtctgactgcttcaattcgaattcggttttgtccgccaacgagacgatggtctgcgcacgctcgcgcagcagccggccctcttcggtgagcgtgatggtatggctgccgcgttcgaacagcgtgacgcccaactcctcttccaactgtttgagctggcgggagagtgtcggctgggaaatacgcagcagttgcgcggcccacgtgatattgccttcttcggcgaccgccagaaaatatcgcaggactcgtagttccatcctcggggctccttcggtgtggacggacttctattgccattatgcccgccgtccgtgaactcatcatgctaaacgcggatagtctcggtaatgacgcggcgaacagcatgcgagaagcggtgctcaatagcgaaagcctctcggctgccgtcgttggtcgtgatgatactggagaccatgaagctcgtgcggcggcggtctagggcgaggtcgagaaagaggtaacggtgtgacgcttgataataggtcagacagtaaggtggtggcggagcagtgccgagcatgaccaacaatcaacggccacaggcaatcgaagtgcgcggggcgcgcgtacataacctgaagaacgtcgacatcgacattccgctgggcgaactggtgggagtggccggcgtctccggttctggcaaaagttcgctggcgctcggcgtactgtatgcggaaggctcgcggcgctatctggaagcgctgtccacgtacacgcgccgccgcctgactcaagccaaccgcgcccaagtggacgaagtgctgcatgtgccggccgcgctggccctgcaccagcggcccaccgtgcccggtatccgttcgacgttcggcacgatgaccgaactgctcaatagtctgcgactcctgttctcccgcgtgggctcgcacgtgtgcccgcattgcggggcgcgcaacgaaccgacgctcaacgtggcggccggcctgcccatcacctgcgcgcaatgcggtaaagaattccatgcgcccggtgccgaagcactcgccttcaactcggccggtgcctgcccgacctgctctggaaccggcatcgtgcgcgaagtgaaccgcgcggctttggtcccggatgaatcgaaaagcatcgacgacggcgcggtgctgccgtggggctcgctcatgtgggacctcatgaagcaggtgtgcggcgcaatgggcgtgcgcaccaacgtgccgttcagcgagctcacgcccgaggagcgcgacatcgtattcaatgggccggccgtcaaaaagcacatcctttataagccgaagaaaggcgacgatttcgccgaactcgacttcacctacttcaacgccgtgtacacggtggagaatgcgctcgccaaggccaaggacgagaaaggtctgaagcgcgtggcccggtttctcaaggaggggccatgcgccgattgcggcggcactcgactgagcgttgccgcccgagccccgcatgtgcgcgggctgaacttggccgaagccagtgcgatgaccttggctgcggcggtggattgggtgcgcggagtgccggaatccctgcccgccgacatgcatccggtggccaccaatatctgcgaatcgttcctggatgtggcccgacggctgctggatctgggcctcggctatctggcgcttgatcgcgccggcaccacgctttcgaccggcgaacgccagcgtgtgcagctcgcccgagccgtgcgcaaccgcaccactggcgtgctgtatgtgcttgatgagccatccatcggcctgcatccctcgaacgtggacggactgctcggcgtgatgcatgatttggtggcggatggcaattccgtggtggtcgtggaccatgacgtgcgcgtgctcaaagccgccgaccatctcatcgaaatggggccggttgccggtgccgaaggcggacacgtgatcgcgcaaggcacggtcggcgaggtggcagtgaatccaagtagtcgtattgcgccgttcttggccgataatgtgagcgcgcgcatccgtgagcgcgtggcggaaccgcaggtgttcgaccttggccacatccgcatgacaaccagccagctgcatacggtcaagccgctggacgttgatattccgcgcggccggctcgtggcggtgacaggcgtctccggctccggtaaaaccacgatggtgctcgaatcgctgattcccgcgctcaaagcgcaggcggcgggggagcagttgccggaacatgtgcgtgaacttgaggccgagggcatccatcgtgcgaatctcatcgacgccacgccgattggcgcaaacgtgcgctccaccgtggccacctatgccgatattcacgacgaactgcgccgcgccttcgcccgatgcgatgcggccaagacgggcggctggaaggccggcgatttctcgtacaacactggacggctgcgttgccccacgtgcgacggcaccggttcgatctcactcgacgtgcagttcctgccggacgtgaccatcgaatgcccggactgcggcggttcccggtatgcgtctgaagccggcgcgattcggcgtgcggttaagggagaatctcgcctctcactgagtctgccccaactcatggcaatgagcgtggatcaggcattggccgtgacccacgacctcaagaaggtccacgcacgtctgaccaccttgcatgatttgggtcttgggtatctgacactcggcgaaccgacgccggcgctttcgggcggcgaagcccagcggttgaagctcgccagcgaaatgggcaaagcccaatcggacgcggtattcgtgttcgatgagccgaccatcggtctccacccgctcgacgtgcgtgtgctgctgggcgtgttcgaccggcttgtggcgagcggcgcaacagtcgtggtcatcgaacatgaccttgacgcgatcgccaatgcggactggatcatcgacatgggtccgggcggcggcgaaagcggcggacgcatcgtcgccaccggaacgccggaacaggtcgcggccaacccaagcagcattactgggcggtatttagggtaaggctcaacggacatctttaccacggcgctttttaggaatatggcatgagccggtgtgggcgtggcacgggctgtggctttatcttttctttggctcactcccgagaatgacatgttaacccgtatggcggtcacgcgcattcgcatagggcaagacgcgagtaggataaccgtccgtggttcaggttcatggcatgagacgcgcaagcgcggacgcgaaatatcagcagatgaccgggcatccggtcaaaccgctgatcctcaaactatgcctgccggccgtcatctccaatctggtgaccactgcctacaatctcacggacacgttctttattggccagcttggcaccgcgcagtccggcgccatcggcatcgcgttctccatcatgaccgtgatgcaggcgctcggcttcttcttcggcaacggcgcgggcaattcgatgagtcgcgaacttggcaaacagaacaacgaacgtgcctcccgactgttggccgtgggcttcgcgggcgcggtgatttccggtttggtaattgccgcgatcgggctgctgaccctgcggccgttggtcgtcatgctgggttcgacctccacgatcgccccatacgccgtgcaatatctgacaccgctgctggtcgccgcaccctgcgtatgcggttcgtttgcgctcaacggattgctgcgataccaaggccagtcggcattcggcatgatcgggctggtgtcgggcgcactgctgaatttcctgctcgcgccattattcattttcgtggccggcctgggtattttcggtgccggcctcgccaccgccatctgccagacggtgagtttcgcgattctgaccacaatgagccgcaaattcggtgtgatgaaactgtccctgcgcaattgcaagccggatgtgctgctcatgcgcgaagtggctggcggcggcctgccctcgctgatccgccaaggcgccggctcgatttccgtgacctgcgtgaacatcgccgccaatccgttcggcgacgcggccatcgccggcatggccattgtgatgcgcattatgttgggcgccaactcggtgatcgtcggcctcggccaaggtttccaaccggtgtgcggctacaactacggtgccggcctgttcgcgcgcgtcaaagaagggtactggttctgcgtgcggctcgccacctgcgtgctcgtggcgttggcggtgttgctgtgggtgttcgcaccgcaactggtcgagatcttccgctccgacccggccgtggtcgcggtgggtgtggccgcgctgcatatccaatgctgcacggtgattctcaacggcttcaacatgatgggcaatatgatgacccagaccatgggtcgcactggcatcgcctcattcctggccctgtgccgacaaggtctgtttttggcaccgatcgtactgattctgccgatgacgttcggcgtgctcggcgtggaaatggcacaatcggtgtccgacgtgctgacattcctagtcactatcccgttcatgcggcgaatcctgcatgaattgcggtgaatggtagatggcaactatgaataatcgaagtgcaaagcgggtgccgagcgttccttctcccgcgtatatcgaatcgctgtaccgcaccatggctgcagcccttggcccgaccggatggtggccggctgaaaccacattcgagattatggtgggcgcggtgctgacgcagaatacggcgtggagcaatgtgaatcgttcgcttgcggcgttgaacacggagggtgtgctcgaaccccataagctggcgattatggggttcgagcatctgcaggaacttattcgcccgtccggcttttatgtcaacaaatccaagacggtacagtcactgagccgatggtatgtggagcgttgcggagcctcacctgagggcgcggcagatattcccgacgccgaattgcggaccgaattgctcggattattcggtatcgggggcgaaacggccgacgacctgatgctatatgtgttttcgcgccgcacattcgtggccgatacttatgctcgccgactattcgccttccttggattcgacgtgccggccggctatccggcattccacagggcctattcgcccgtggtgctggatacgagcctcagtgtcaaggatttgcaggaattccatgggctcattgacgagttcggcaaggcctaccgcgacgacgcggccaaaagcgagtcctttttgggtgaatggagggcttgactgcacggcgaatcgttctcaataagaaaagtgtgaggcccgcacggtgccaatcgcacatctgagtccaagaaatggctgtttgatgctattcccgcgaatgcgcgattgagtgatattgtgcgtttgcctcacacttttcttattgagaatgattcgctgcgatatgccgcttacttgacaaccttaaaaccgccggtccatggggtctgattggtgacgccttcagccgctgctgctgcggccttgtccgggttgcggtcgatgacctgcacgatggcgccagccttgacggtgatgcctgtgacgccggcaatccgctctccatcgagcagatcgacgacccctatcgccgcggcatcatcgccgtgcacgatgccgaaattgccgccgagctcgactggctgcgctcaatgctgggtgttgaaaacgagtctgtgacagaatagttcgaccgacacaatcgccaaaacgccgaacaggagccaatgatgaccgaagacaagccgatcgccaagccgattatcgatgatgcgacgcgcgagaaaatggcgcttatgttctccggcgaggtctacctgccggatgatgtggacggcttttttgatctgcaggccgcccaacgcgatctccagcttgaactcaacgccacaccgctgaccaatccgaaacgccgcaccgaactcatgcaggtgtttttcggcgccgcgggggagggcctgtacctcgaatgcccggtgtatgcgaactggggctgcaatacctattggggtgagcgttgctacgccaacttcaacctgacgctggtggacgatggtgagatcttcatcggatcccacaccatgatcggccccaacgtcacgcttgtggccaccggccatcccgtgcgtccggacctgcgctatcagggtgcccagtattcgctgccagtccacatcggtgaaaacgtctggattggcgcgaacgtgaccgtactgcccggagccactattggagacaacgcggtcattggcgccaactcactggtcaccaaggacatccccgccaacacggtcgcctacggcagcccgtgcaaggtaattcgcgaaatcaacgaacgcgacgacgtctactactggcgcgaccgtcaattcagtgagcgttttaaggtcaaagagcagtagcgcgaaagctcactcccacacgtcgagcttgcggtctttgtagaaacactcgcggtccttgtcgccgatttcgcgtgcgacttcgcaaggtgcgccgtaagcgaccgagttggcgggggtggaatgcgtcgcgactgaaccggtgccgatcacgcaattgtcgccgatggtgactcccggcagaatcgacacattggcgccgacccacacgttgcgtccaatggtcactggaatgcaatacgtgtaatggtgctcgcgcagcacaggcaacacggggtggccggcggctcattagcacggggaacggttgaacgagaagtggattgacatgtggtggtatcgaacatactgatgcgtgtgccgccgagcctgtccagatggttgcctatatgaaccagtgacaggaaatcacggggagggaacgagcgagaggagcgtgcatggggcaatttggcgtcatgattggccagttggtcggattcctgatcatgctgatggtcgggtatggatgtgtgagactccggttctatggccagacggcgctggacggcatgtgctcgctgctgctcaatgtgctcatccctgtgctcgtgttctcgaacgccgtcgacggtgcggaccgcgcgcagcttgccgccaactggggcgtgatgctgctgaccgccgtgatgtatgcgctgctcatcctggtgttctggctggtcgccaagctgttgaggctcaaaggttcgcgtggccatgtgtttcaggcgtcgctgattttcggcaacgccggatttatcggcattccgttgattatggcactttggccgcagaacggcgcgatttacgtggcactgatgtcgatcatcgaccagacgctgctctggacgtacggcgtatggctgtgcgagccggtcgctgaaacgactggcggcaacgcgattggcgcgcgaggtgcggtcgcgaacggttcggtgaacggcgccggttcggtgggggaggctgcgaacagcggttctccggtggccgcccgcccctcgctaggcactcgcgtcctcggcctgcttaaacgattcgtcaaccccgccttcatcggcgtgatgctcgccctgattctgattctgcttggcgtcaaggtgccggacatcatcctcaagccgctgcacaccatcggcaatatggccacgccgatgtcgctgatctacttgggtggcctgttcgcgctgaccaagtggtggggcgtcctcaaacgctacgaactctatgttggcctagtcgccaagatgatcgcattcccgctcgctttctatacgctgctgaccgcgttggccagcgcgctgccgcagctgcccatcactcacgacatgattctgatgattaccgtgatcgccggcctgccgaccatgaccaccatcgccatgttcaccggccgcaagaacaacatgcccgactatgcggtcggcttcgtgctcgtaagcacgctgttctcgctggcctcgctgacgatcgtgtcggcggtcgtgttctagtgcgccgcgcataggcacataacagctttcatcacatactctttgcggcctcatcaatgcagcgcagcgcgtcgtattcggcttcgaccggctccagccattcgttcgaagcgccgtccaccacattcataatggcgatatgcgcgaaatcggaatccggcgcagccccgtgccagtgcttggtctccggcaccacgtacaccacgtcgccggggttgagctcgaccggctccttgcccccactcctggtagtagccgcgcccgcccacagcagagagaagaagggttcagttatggggttcatcaggaacctcgccagccgccgtaactgctgacatgctccatataaccgcccaagtcatggaggaatgatgcgtgttcctgtcaattcgttgggaaaaatgtatcggacatgtaagcagacatgcacaaatgcgaattccgccgcaagcggccggcgcatctctccaaccaccgtcagcggatatatcgacgaaatgatccgcaattatctgcttttcgaagcaaccggctgttgagcggatgcgcagaacgttcgcacgataatcggcgtggcaacgccgtgatatctaaacccgtctgcacaacccgaaaaaagaccgcaaatcacggattgtgcagacagccgcggggagcatgctataacgggcgggactcgtaaatcatttggcgatcgccgaaatagagggcgtcacgccaggaggccctcttgtgggccgcctcctgctgcggctccttgatcggcacgaaaaaccagcgaatcaggccgagcaccatgtcttgcacggaatgccagatgccgatatatgcggtcagcgcccagaatgtcacgatcgcattgaatccggcgaacaccgcgttaccccaattatgcgaaaacgtatcggcatagaacaccatgcacgaataaataatgatcacccacggcatcgtcacatacaatgccggagacgcagtacgattattgaccttcggcgtacgcgcgaacggaatcttcgtgttcgtcatgccctgctgaatcgacttgagcgtaccggaaagattcaccgtcaacagcacgatattgaaaccgtaaatacggaaaatatcagaacgcttatacccgttacgtttcaaatcactcgacatggtggcaaaatacggcaacgaagcgagcaccacccacgggctcagcaaccgctgatcgaacggatacgccaacaggaacatcaagccgaaactcgaccatgcgatggatgccatgtagttcacgcgcaacgcccactcgcccagcttcacatcattgccctgctgatgccgggcatgcacaatgcggaagaatttgccgatgattagcagaccaccgttcgcccaacgtcgccgctgcaccaccagcgagccgaaatccggaggcgtggcactataactcaaccgctccggataattaaccaaatgccagccgaaatagcccaaatcaatgctggattcggtgtcttcaatcaccgtgcgatcctgaatatacgttttcaccgtgcgcgtgccctcagttgagaccacgcaaatgtcgtcaagcgcggccttgcgaatcaccgcgttcgcgcccacccagaacgtggcatcatagtacgtcatgccctgatgcagcatgtgctgaatgtcggtggtggcggccgctatgcgttcgattcgcgtcggcgcaccacgatacgaggaatacggggtttgaatcacggccatacgctcgttgcccggctgttccatctggtacaccaaacgcaggcagtaatcgcgcagcagcatggaatcggcatccaatgtcagcacatattcggaatcgcgcatcacgaaatccggagattcgtcctcgcgcacgtcacgcaaaatcacgccatccgacgtttccacacgcttcaacgagtggcccatcaacccgatgaacgaattcagattcatggccttgttgccttcgcgagaagtcgatgcgtacagtttgcgttcgaaagaccatccttttgcggtgaagatacgcaccaaacgttcgtacagttgcagaatgcgattcgcgtcgacatgctgctgcaaagtgattgattcgttcaacgcctgttccgtcaaacgcaagtctcgcgcaagaccgcgcaatacctgatcgcagaagaaatcgtcggtatgatcttcgatcagccaagtatcggccttatgttccagccattgcgcggccgcacgatagtcttccgcacagtgtgcgaccacactacgtcttgcgctcacctggttggcgagcgccgcagcggtttcatctcgcgctttcgtgaagcgttcggctggcgccgccaattcggcgagcacttttggcatgagttcacggcttgctttgaggatcgcacgcgcttcgtcatttttgggatgtggaggatcgtcgattaagagcacgactgccaaatcgggaaattcttgcaatgcggctgaccagatcgttttttcgacgactttcggctgttccacatacgacggaatcagtacggtgatgcctttgccgtagttgtgtgcgaaatggtcatcgagcatcgctcgaggcacacgctcatgccggatgaagcggtatagcgccccttgccgtgtggtcaagtagacgagcgcactgaaaatcagcgtggtcacaatcgtcatgtacagcacgccttcaaccacgaaacgtaatgtgagtgagggattgttgacgaacaacgacagaatcatcgtgatcatgtagacaagccatgaaataaccgtgcatgcaatcgcaacatagccgagcacaactcgcgtcggcgaaggcttgtcatgcataatcgcaagtggttgcgtggaggtttccgctccccattgatgcttgcgatcgccgcctttattaccccctgtttttgccacctcaaaccccctttgcatcgtcaacaacgcctcaccggcgcaaaaaacatacgcgtcactgcctaaatcgtcgtaccagccacatactacactcccttgatgtaagcgagatataagaaagccagcgcacgagaggaacacccaatcccccgtaaaatcccccgcctgtgcactgaagccaagcggggggaggcacagcctgctcggccacccgatgaccccatcggcatgacgactggacgatttttgaaagggaatgatgaaacccttgtttccgggaaggcgtttttccttcctccgattgttcatagcgatactgtgcatcgcgctcgttgctgccggcacatggtcgtggatcacgttcacgcgaacggcggctaagaaattgcccgaaccctggttcggtggctatgtagacgtgaccgcaactccctcatacgagttcgaatccaaggtaggcaacgtctaccggaatgtgattctcggattcgtcaccgccggcgacggttgccagccaagctggggcggctactacacgctcgacgaagcggcctccacacttgatcttgacagccgcatcgcgcaaacctacaaaaccgaccgtacggtaaccgtcagcttcggaggccagaacggcaccgaactggcctccgcatgcactgacgtcgacgcgcttgccgacgcataccagcaggtgatcgaccgctatcacgtcacctcgctcgacttcgatatcgaaaacacgaatctcgacggttacagtgaaaccgcaacccggcgagcgcaagccgtggcaaaactcatcgccaatggaaaagcgaaaaacaaaggaaaagacgataccagtcacgatctgacaatcagcctgacgcttccagccgacgcgaaaggccttacaacgcaaggaatgcaaaccgtgaatgcgtttctggacgctggcgtgacgctctccaccgtgaatctcatgaccatggatttcaacgtggcatccacgtcgatcacacaatcaaccttgattaaaagctcgttgaacgcggcccacgcgcaatacaaaaccttgctgtacagtcgtggcaaactcttcagcgaccatcagatctgggaactgctgggagctaccgtgctcatcggccagaacgacaccaaaaacgagtatttcacgctcgacaatgcgcgcgaaatcaacacgttcgcactggaaacaagcctgggccacttaagcatgtggtcgttgaaccgcgaccagcaatgcggcgaaaactatacgaacaccaacacgctcaaaacgttctgcagtggcatgaaacagacggacggcgaatttgccaccaccctaggatcaggattccgaggcacaccgggcacgctcgtcgatttcgataatgcacgctggaattcctcgcagcaggcctaccccacatgggagccagacgtactgtacaagcaaggcgacaaggtgatctggaacggcaatatctacgaatcgttgggcaacaacgaaaacaagcagccagacagcgccgaggaaggccccaacgcaccgtggcgcatcatcggaccggtgctataggcaagcagacacacaggcaggcgctatttcccaacaaaagcagcgcaaaccgtgaaacaagggaacgaaatcaggcaatcatggcatcgaagcaatcgaaacatcaggcaaccaccggcagccagtcaaaagatggcatcggaaagccggtcagactcaccattctggccattatttacacgctgtttctcgcagccgcaatcgcattccatgcacaggaaggcgtgcagcgacttatggaaggccccgcgcgcatctgcatatggtcgctgtgttttctgctgtgcctggtctaccacaaaaagcgttcgtcgtatcgcgttgccgccgaacacaccgtgctgccgccgttgaccgtcatactgctggtaaccggctattttcccgacgtggccatgttcctgatcatcgtcaccatcatcacgtcgatcatcaccgcacgcagcctgaaaatcggcattcttcgcgccggaacaacacttgtgccaattccattaatcaaaatactatttgcgaatacttctcacgtactgtcgattactatcaaccagcattctgtcaatgctgcatttaatccttatcaatttcagaattggttgctgccattgctgattatgactgttgcagtgccgattgttcgattgatttgcgatattgtaacgttcttttttgcgcaaattccgattcgtaaagccatgcacgagtattcgctgtcccacattcttgccatggctttggctgatttgctggcgattgtgtggattcctgaaattctggagttcgccaatattggttcggataccgccaccgtgctttccgtgttcatgctggcactgatcgcctactcactgttactgatgacggtcgatacgatgagccggctcgcgcgatcccgaagtgcgctgaaatgcattgcgaatgtgagcgacgcactgccgttgccgaatcaagtgccggaggagaccgtggtgaggcgtatcaatcgtggcctcacccgcatgcgctgtttcgtcagcgatgcaaacaatcttgataaaagaggatattcctaccgatattccgcgcctatttccaccggctcgcgacagtattatcttgcgatggaacgcagcatttggaatcgtccgttcacgtcgaccgacgaaacgatattgctcacttgcggtgaagtgcttactgaatcgttgcgcgtgaacaaggaagtgacgctgctgcgcaccgaatcggaaacggatgcgctgaccggagcactcacgtatcgtgcgttcatcgggcatctgaagagtttgcagaccgaaaatgtgcataatctggttgccgtggtgtatttcggcgtggagcatttgcgcaccgtcaacgaacattatggacgcaaaatcggcaatgccgtgctgcgatcagtgggtatgcgtttaagccagctgctaccggacaatgccacattgtctcgcgtgaacggcgcggaatttgccatgctcgtaaccgatgtgacgtcaaccagtgatgtggaggagttggccacgcgcatgcgcaaccttgccgtcatgccggtgcataccgaagagggcgaggtttccgtggacgtgtcgagcagtatttcgttctcgaatgcgacggacggtttcgccgtgctgcttgccgatgcgagcgcgcatatttacgaatcggaaagttccaatctgccggcggtcgacggcacgacggccacgctcgccgcgcaaaatggttcagacgattacgtcaacgtgtccgatgtgcttcgccatgcgatcgaagacaatacgatttccgtgctctaccagccgatttttgatgtgaatacgaaacgcatcacttcgctggatacgattgtgcgcgtgcatgacgcgaagggccgcacgctggcaccgtatttcgtaacggccgaagcgcatcgcctcaacatgagcgtgcagctgacgctcgacgtgctggaaacctgcgtgaaagacatgactgcattccgccaggtggcgcccgaattggatattgtggacatttgcatgaatggttcggaattaggcgcgtccatcttccacgagcgcttggagcagttgactcatgaacagccacagctgcgtttcggtctgcagttggggtcgcatgccattcatgtggcgcatgatgaagttgacgatgaggttgccgatcttgtcgctttgccgaatgtcaagttgggtttgaccaatgttggcacaacgtattcggaggttgctgcgttcgcgcatttgcctttggatttcgcacgattcgacaagacggtggtacgcgatttccgtacgcctcgcgcgaagcagatcatgcagcgaacgctcgatatttcgcgcgataatgatgcgttccatgtggtgttcgatggcgtggagactttggatcaggttgagttcatccgttccatcggaggcacgcttgcggagggcacgctgttgagtaacgccatgaacgccaacgagttcctcatgcgtctcgaaaccatgggcacttcattgcccgaagccgccccgaggcaagctgagtagagacgattctcggttatatcacgattgctttatctcgggaaatgcttggaggaaatatggcaggatggaatcatatgtgctaaatcaatgagtaagcccgtttagccaatgaccgcaaaatcagacagcatatgcgaatctccaccagtctcgtcgcacgcggcagcttcaccgttgcaagactgaaaacaaaaatagcatcgtgagcagaacccagctatcgcgctttcggtggttggtattgatcgtcggcggtgaagcaggtgcgatagaccatggccatgatcaggccgtcggccagcaaggtcagcgcggcgatggcgccgaagaccacgaactggtatttggcggcgttcagcggatctccgccggcgatcacctgacccgccatcatgcccgggatggtcacgatgccgctggaggccagcgaagcggtggtgggcagcagtcccagccgaatcgatgagatgacggatgggcgggcggactcccatgccgtcgcccccagggccagcatcatatccacctcgtcgcggcgttcctccatgctttcatagaatcggctcagtccgacagcaagcgcggaaacggtgttgcccagcagcatgccggtcaggggcaccaccagctggggcgcataccatgggtgcgggcgcacgatgagttcggtgaccaacgccagcatgagcagcatcgtgatgaccaagctcaggaagatcggtccggcaaggcccttggggatgccgtgcgcgcgggacatcacgatctgcaccgccgcgatcagcatgaccgtcatcagggcgaacaccatccacacgctgttcgagcgaatcacatagctgatgatgaatcccatggcgcacagctgcacgagggcgcggcatgccgaccgcatcagggtcctgccgatgcccatgtgcatgagttcgctgatgatggccgccgcggccaccatgcccaacgccaggacgagaccccagacgtcgatgtcgtaggcgccgttcatgggcgcacctccttatcccgcgtcagatcggtgagccgtcccgcatcgagcatcagcgtgcgggtggcgcgtccgtccggcggacggtgtcggatgcggatgatcgccatgccgtgtgcggccgcgtccgccatgatcgcggccactttggatgcgttgtcgtcgtcgagtccggcgtccacctcatcggccagcagcactttcgggtcggtgagcagcgtgcgggccaacgccacgcgcgccgcctggccgcccgacaggtcatgcggcgtgcgcgtcaggtcgatgtccttgcaccccatcgcgtccagggtcgtgcggatgcgttcgtcgggcagcagccgcgcggccttgccctccttgcctcgaatcgcgagcgtccagggcagccggatcgcctcggccacgtccttgccggtcaggatcgatttttgcggcaggtaggagacgtcccgccgccattgctgcgcgctgaattcgtcactgcccacgccgtcgaggacgaacatgccgtgcgcgtgcgggttgagtcgggcgcatgcggtcagcagactcgatttgccggagccagatgggcccaccaggtcgatgatgtcgccgcgttccatgccgaaggacaggttgtcgaacaccgtgcgttcgtcgtccgacggcgattgcgcggggacgacgcaggacacggacatggcttcgaagaagggtcgcatattcatccagtctagtcgggggttcacgtgggaaaccccagcgttcgcttcctgtatacccggtgtggcataataaccaaggcaatttttgggctttgcctaagctagtttgaatttgaaataggtgaataacgtggcacagactactaacgacatcaagaacggatccgttctgaacctcgacggccagctgtggaccgtcatgaagttccagcacgtcaagccgggcaagggccctgccttcgtgcgcaccaccatcaagaacgtgctctccggcaaaatcgtcgacaagaccttcaacgctggcatgaagatggaattcgagaccgtggacaaccgtaccctccagtactcctacgaggacggcgacaacttcgtgttcatggacatgaccacctacgatcagatcatgattccgaagaccctcgtgggtgacaaggccaagttcctgctcgaaggcaccgactgcctcatctccttccacgacggcactccgctgaacgtcgacctgccgggctccgtgatcctgaccatcacccacaccgagccgggcctgcagggcaaccgctccaacgccggcaccaagcccgccaccgtggagaccggcgccgagattcaggtgccgctgttcatcaacgagggcgaccgcgtcaagatcaacaccgaggatggctcctacaccggccgcgaaaactgatcttctccacgcaacatacctagtcgacagtcgaaccaaaggaccagcagcagtatggcacgttccaccgcgcgcaaaagggcgttgaacaccctgtacgaggccgacgaaaaggggcaggacatcctttccctgcttgatgagcgcatcgcgcatccgggtgctcagaccccgcttcccgactacgccatcgacatcgtcaagggcgtggccgaacaccgccgccagatcgacatgaccctggacgatcactccacgggttggaaggtcaggcgcatgggcgtggtcgatcgcaacatcctgcgtatcgctgcttgggagatcctgttcaacgacgaggtgccggacaaggtggccatcgacgaggccctggcattggccaagaccctgtgcgatgacgattcacctgcctttatccacggcctgctttccgcggtgtgcaatgcgaagaacaccgagcccgcgggatcggtggacgatgagcccgccgaggaatcgaacgaaccggaccagtccggtcaaaccgattttcctgcatccgagcccgccgccccgtccgctgagacccagccgacggtcgattagtcatttgttttcaagcctccctccgggaggcttttttatgggcggaacaactttccgccgtgattgtccaagccggttgtgagccggctgccccgccagcggggcgagacttcgcgcgcaccggcgtgtgagtctgcgctggccgttaaccttggtacgaatacccgaaaaacataagggggttttggtgagccagaacgagtccggaaccatcgcaattccgatgtatgacaaggacgatgcagtcctcgttttggaagacggacaggtatatgtgggggagccgtatggcgccctgggcgagacgaccggtgagatcgtcttcgccaccggcatgaccggataccaggagacgctcaccgatccgagctacgatcgccagatcgtcgtgcagaccttcccgcacatcggcgataccggcgtgaacggcgaggatcccgaatcctcgcgtatctgggtggccggctacatcgtgcgtgatccctccccgaatgtgagcaactggcgtgctgagggcagcttggacgatgacctggtcaagaacggcatcgttggcctgagccatatcgacacccgtaagctggtacgccacctgcgttccgcaggcgtgatgcgcgccggcatcttctccagcgaggctttggtcgatgccgctaccggcaagctcaagaccatcgagcaactgcttgaggatgtcaagaacaccccgcagatgcagggcctgagcctgtacgacgaagtctccaccaaggagacttacaccatcgagccgtgcggcgaatacgaaggcaaggagccgctgtacaccgtggccgccgtggaccttggcatcaagggcatgactccgcatcgtatggccgagcgcggatgccgcgtgcacgtggtgccctccaccatcacctttgccgaactcgaagccctgaacccggacggtgtcttcttctccaatggcccgggcgatccggaacaggccggccccgaaatcgaactgttgcgtcaggtgctcgatgccggctacccgttcttcggcatctgcttcggtaaccagttgctgggccgtgcgctcggctttggcacttacaagctgaagttcggccatcgtggcatcaaccagccggtcaaggatctgaccaccggcaaggtcgaggtcaccgcccacaaccacggcttcgcggtcgacgccccgattggcaagcaggtcgatgcaccattcgaaaacggcaagtacggcaaggtgttcgtctcccacatcgatctgaacgatgacgtggtcgaaggcctgcagtgcgtggacattcccgcgttctccgtgcagtaccacccggaggccgcagccggtccgcacgatgcggcctacctgttcgaccgtttctgcgaacttatgaagaacaaccccaaggaaggtaagtgatatgccgaagcgcaccgacatcaaatccgtgatggtcatcggctccggcccgatcgtgatcggtcaggctgctgagttcgattactcgggcacccaggcatgccgcgtccttcgtgaggaaggcatccgcgtcatcctcgtcaactccaacccggccaccatcatgactgacccggagatggccgacgccacctacatcgagccgatcgccaccccgatcctcgagcagatcatcgccaaggaacgccccgacgcgctgctgcccaccctcggtggccagaccgcgctgaatgccgccatggcgttgggcgaggcaggcgtgctcaagaagtacaatgtcgagctgatcggggcctccctggaagccatcgaccgcggcgaggaccgtgagctgttcaagaaggtcgtggacgaggccggtgccgaatccgcccgttcccgcatcgcgcacagccttgaggaatgcgacaagatcgccgaagaactcggctatccgctggtcgtacgcccgagcttcaccatgggtggcctgggctccggcatcgcccacgacgaagaggagctgcaccgcatcgccggcgccggcatccattactcacccaccgacgaagtcctgattgaagagggcatcgaaggctggaaggaattcgagctcgagctcatgcgcgaccgcaacgacaacgtcgtggtcgtctgcccgattgaaaacgtcgacccggtcggcgtgcacaccggtgactccatcaccgtggccccttgcttcaccctgaccgatcgcgaataccagaagctgcgtgacatcggcatcgccatcatccgcggcgtgggcgtggacaccggcggctgcaacatccagttcgccatccatccgaagaccggtcgcatcatcgtcatcgagatgaacccgcgtgtttcccgttcctccgctctggcgtccaaggccaccggcttcccgatcgccaagatcgccaccaagctggctctcggctacacgctggacgagattcgcaacgacatcacccagtccacgccggcctccttcgagccgaccatcgactacgtggtcaccaaggtgccgcgcttcgcattcgagaagttcccgggtgccgaccccaccctgaccacctccatgaagtccgtgggcgaggccatggctctggccggcaacttccaggagtccctcggcaaggccatgcgctccattgacaagcgtcacatgggcttcaactgggacggcgacaagccgtccgcagatgaggtagctgagttgctcaaggccattcatacgccgaccgaacaccgctacctgcagctcatgcgtgccatctggggtggcgcaacgctggatcagctgtatgcggccaccaagatcgacccgtggttcctgaagcagctgctgctcatcaacgagactgcacaggccgtgcgcgaggccgagactctgaccccgaagctgctcaagaaggcgaagctcgccggcctgtccgacgtgcagatcgcccatcttcgcagcctcggcgacgaaggcgagaacaccatccgcgaattgcgctggaactatggcctcaagcccgtctacaagaccgtcgacacctgtgccgcagagtttgatgcggccacgccgtactactacagctgctacgccgatgagaccgaacttcgtccgcgtgagcgcgaggcggtcatcatcctgggttccggcccgaaccgcatcggtcagggcatcgagttcgactacacgtgcgtgcacgccgtgcaggagctcggcaaggactatgacaccatcatggtcaactgcaacccggaaaccgtgtccaccgattacgacatgtccgaccgcctctactttgagccgctcaccttcgaagacgtgctcgagatttacgaggccgagaagaagatgggcccggtcaagggcgttatcgtccagctcggtggccagaccccgctctcgctggccgcgcgtctgaaggccgccggtgtgccgattctcggcaccaccccggagtccatcgacttggccgagaaccgtgagctgttcggcgaggtccttaagaaggcggagatgaatgccccgcgttacggcactgccctgagcctcgaagaggccaaggaagccgcacatcgcatcggctatccggtgctggtgcgcccgagctacgttctcggtggccgcggcatggaaatcgtttatgacgacaagcagctcaacaagtacgtggatcgcgcgcttgccgaggcccaggccgatacggtggtctctggccgtctgccctccccgttgctgatcgataagttcctgcaggatgccatcgaaatcgatgtcgatgcgctgttcgacggcaaggagctgtacatcggcggcattatggaacacgtcgaggaagccggcgtccattccggcgacgccgcctgcaccctgccgccgtctacgctgtccgacgaccagattcgccgtctgcgcgaaggcacctacgccatcgccgccggctgccacgtgcagggtctgatcaacgtgcagtacgccttcatggccaacacgctgtacgtcatcgaagccaacccgcgtgcttcccgtaccgtgccgttcgcatccaaggccaccggtgtggctctggccaaggccgccgctcgcattatggccggcgagaccattgccgaccagcgcgctaacggtctgctgctacccaagggcgacggtggcgacatccaccccggccagcaggtcgcggtcaaggaatccgtgctgccgttcaagcgtttccgcactccggtgggcaagaccgtcgacattctgctcggacctgagatgcgttccaccggtgaggtcatgggcttcgaccgtgacttcccgcacgccttcgccaagagccagctcgccgcctatgacggtggcctgccgacccacggcaacgtgttcatctccgtgaacgacactgacaagcgacagctgccgctgctcgcagtacgcctcgaagagcttggcttcaagctttgggccactgagggcaccgcttccgtgctgcgccgttacggcatcgactcaaacatcgtggacaagatcagcacccgtgtggacaccgatccggaagctccggttgaggtgcatcatgccgccggatccgtgggcaagaatgtggttcagctcatcgaagagggcaagatcgacatgattctcaacacgccgaactcccgcggctcccgctccgatggctactccatccgcgccgccgccatcgccgccgatttgccgcagttcaccaccattaccgagttccaagccgcactgctcgccatcgaggccgtgaagcataatgattatcagatcatgagcatccaggagcattcgaagcagctgttcgaattggagaaacaggagttctgatggttgcacccagcgatgaggagttgcaggcccagcgttccgatttcggtctgcgtttgagcaattcgatggccaaatacgggccattgtgcgtcggcatagacccgcaccgcaaactcctcaccgactgggggtacaacgtcgacgccgaaggtgccgagctgttctccatgcgcatgctgcaggccgccaacggtcgggccgcagccgtcaaattccagacgccgatgttcgagcgctatggagccaagggctttgaagcgctcgagcgtgtgctctacgctgcccgtcagatgggtgtcatcactatcgtggattgcctgcgtggagggctctccactaccatctccgccattgcggatgcctacttcaagcctggtgcgccgctattggcggacgccatcaccctgctgccgtattatggcgcgcgttcactgaatggattgattaccgaagcgttggaaaacggacgcggcgtgttcatcgcctcgttgacgtccaacccggagggcatgagtctgcaaaccgccatccggcagtccggcgattaccggggacgtaccgtggcattcggtatcgcgtccaacgcgcagcagcacaatgcagacatcgacggtatgggctcggtcgggcttatcatcggtgcgaccattggccagtggatgaaagactccggtgtgaacccttccgaattcaccggccctattctctctcccggctacggctggcagggtgccgaagccaaggacctgaaaaccgtgttccgcggcacgcgcagcaacgtgctggtcaccgtatcccgtctcatcgcctcgcacgggccggatatcgcttcgctgagccaggccaccgagtcgattgcgctcgacgtgcgccaggcgctgatggaagccaccgctgagggcgacgaaaaccagtaacccacaggaatctgctactgcacattggaggaattcatgaccgagaacactcacgctggtcgtctgatcgtcctgaccgggccgaccgccgtaggcaaaggcactgtggaggccaagctgcgcgccgatcacccggaagtgtgggtgtccgtttccgccaccacgcgcgatccgcgtcctggtgaggtcaatggcgtgaactactggttcctgtcagaagacgagttcctggccaaggaacaggcgggggagttcttggaaaccgcagtggtgcatggaatggcccattacggcacgttgttaaagcccgtcgaagagcatctggctgctggtacacccacgattctggagatcgatttgcagggtgcccgccgcgtcaagcagcgcgcctctgagcttgatcttgaggtggtgtacgtgttcattgcaccgccgagcttcgaggagctgaagtgtcgtctgattggccgcggcactgaaaccgccgaacagcaggctcgccgtttggaaaccgccaaggtggagctggccgccgaaagcgaattcgatgtgactattgtcaacgagaccgtcgatcaggccgcagccgacctgtggaacgtcatcgcccaggaatacggcttgtagtttttctcttttttggggagccgagaacgagccttaccgctgtaccaccaactgctggtgcagaatttcggtgctgttcttggctggtgcctgcttccatcggatcgtgctggattcatggtgctcgctgacataatgccgcatccattcgaagcactgctgggtttggatggcatcgcttaatgcgcggtgttcctcgttatcggcaatgccgaatcgtacaatcaggtcggcgagccggtgatggctctgcttggggaacagggcacggctgatttgcatggtgtcatagtcggcgcaggcgaatccgcatcccgcaatatggcgggtgttatagtccaggaatcgcagatcgaagctgacattatgaccgacgatgggctcagtctcagccgcggcgttggaatcggcgagccaggaaatgaattgggggagcaccccgtcaatgggatcatggtcggcgaccatcgcgtcggtaatgccggtcaacgcggtgatttgacgaggaatcgggcatagcgggttgatgagttgctggaactggtcaacgatacggccgccgcgcacgcgtacggcacctatttcggtgatggcgcaacggttcggataaaacccggtggtctccaaatcaagcgccacataatcggtggggaatccggtggcgtcttcggcaatcggggtgccggcggtccagtcgggatgggactgctggccaaaaacggtaatgccgggaacggtcactggatgctcctcctatcggtcgatgttcggtgatttattgtagcggcagcccaacctgacgaaaaagccccgtatctgcgaaccgggtacaggggcgggaaatcagctgatacagccgattcggttactgctgtatatcgtcaagtttgtcttgtatcaacttgtcgaggtcattcagctctttagacgggctggccgtttcgtccaaactcgtgagtgcgtcgttcagctccgttgaggcatcgtacggatattcgatgtcatagtactgatccaagagattgtggtactggttataggcatcggtgccgtactcgatgttgttggggtagccgggctgtgcggggtaaccaaggcgtaacggtgcgcctggctggcccggttgacccgtgtaagcgggttgaaacggctgattcggctggccctgtggagcatagggctgtcctggctgcactggctggaatggcactgcgggttgcggtgcattacctggcgtaggttgttgtgctgtgggctttaccggctgatcgaatggtacctgaccgttttgctggcgtcatcgtcagtggtatgttcgtcgctcattacgagttcctcaaccattgaatagcatcacgataagcccccaacaagccagatgccaagcagaatcctaacattgttcggtctggttgcactaggggtaatccttcgtcggattgccgatatcgggggaaataacggatatatttggtaacgaataatcgggctgtcgggaaaggtgacatatgaaacggatagtggcaggcatcgtggcacatgtggatgcaggcaagaccacactatccgaggcgttgctgtatcgcactggtgagattcgcaagttgggccgcgttgaccatggcgatgcctttctggatacgaattcgctggaaaaggcgcgaggcatcacgattttcgcgcatcaggcactggtggagcatggtgatctgcgattgaccttgctggacacgccggggcatgtggattttgcggccgaaaccgaacgcgtgctgcgtgtgcttgactacgcaattctggtggtctccggtaccgatggggtgcaagggcacacggaaaccctatggcgtttgctggcaagatatggtgtgccgacgttcatctttgtcaacaagtgcgatgtagacggatttaacggtgaagccgtgctggcccagctgcgcaaacgactgagtgatgcggcgtatccgttgcctgcagtcgatggattgtccgatgacgatgaggtgccgttaggggagtctgccgaggatatcgccacattggatgagaccgcgatgaacgactatctggagcatggctggctgtccgtagtccggttgcgcgcaatgatcgccgcacgcgaactgtttcccgtgtacttcggctcggcgttgaagttggaaggcgtcgaggagttcttggatggagtggaatctttcaccgccgaaacgcagtggccggaacggttcgccgcgcgcgtgttcaaggtggcccatgacgggcagcacaatcgcatgacatggctgagggttaccggtggcatgttgaaggccaaggaaatcgtatcgtcgtcaacgcggaagaccgccgagccggcatggtccgagaaagtcgaccaggtgcgtgtatacaacggtgccaaattcgatacggtcaccgaagtgccagccggcgcggtatgtgcggtgacagggttgacgcagactttcccaggtgagggattgggctatgagccggatgccgaatcaccgtcgctgcagccggtattgacatacacggtgcttcctgcagatgcgggatcgggcgatgccgaaaacgtcggccgagatgctgctcagcgaaataccggacagcatggagtggatcccgacaattcagatgatgctcaggaagacagcggattcgtggcacgcccccgattcgatgatctgactttgcataaggtcatcaccgcattgcgcgagctggaggacgagaatccgttgctgcatgtggtgtgggtggaacggctagccgaggtccatgtgcagctgatgggcgcagtgcagttggaaatcattcagcagaccctgcatgatcgtttcggtcttgatgtgtcgttcggtccgggctcgattctgtatcgtgaaaccatcaccgagccaatcgagggcatcggccattttgagccgctcaggcattatgccgaagcgcatattctgctcgaaccggggaagcccggaagcggcatcagcgtggcatctgctttgtccgaaaacgatttggatcgtaactggcagcgtctgattcttacgcatctgaccgagcgtgagcatctcggcgtgctagttggtgcaccgctgaccgatatcaagatgacactggtggcaggcaaggcgcatctgaaacataccgaaggcggtgacttccgtcaggccacctatcgtgcgattcgtcagggtctgatggaagccagagccggagtcagcggacgtcccggctctccggttgaggaacgccccgataccacgggccagggcaactgtcgactacttgagccgtggtatcgattccgtcttgaagtgcccgccgatatgatcggccgggcgatgagtgatgttcaacgcatgtctggcacgttcgattcgccgtccaccgacggtggctacgcagtgattgaaggtgaagcgccggtttctgaaatgcgtgactatgcgatggaagtgaatcagtacgcccatggtcatggccggttctccgccactttcggcggttataagccgtgccatgacgcggaacaggtcatcaagatagccgtctatgaccccgaatcggatctggacaacaccccggattcggtgttctgcgcccacggtgccggctatcccgtcaaatggtataaagtcccggaattcgcccacttggattatgccactaccaaatctgcggcctaataaacccgttcttctccagaaaacgttggatatcacgcatctcaggcatattgattgaatgggccatgcccggatacacttcttcggtcagcgtgccgtgctcacgccagaatgtgcccatcgccgcaacatcggctttggggaagatatcgtcaatcgcgccatgcccatagaacaccggcggctgcagcgaagcgagctgtgcatctccgtcaacggtgcccggcgccagccagcctgaacaggatacggctgcagcgtaccggtttgggttgaatcgcagtatatgggtggccagcaatccgccctgcgaaaagcccatcatgactatcggccgggttgcgggaatgtttgccccgacccatgcatcgatagcctgcgccgcggcaagtgcctgttcgtccaatgatttgccttccggcacgccctcatgcgcccatgagccaaaccatgtgtatcccatgccataggcgatgggagcctgcagactggcatagtcggcggaaccggccccacagtagttcagcaagtcgggcaggtcgtattcattggagccccagccatgcagtagcatgaataccgggtcgttttccaggcccttcaatcgggtcaaagccttggtgatttccatgcctcccagtgtagccatcgcgagtgtcggaacgggcgtttgaaccatccataagcaacccatatagccacgccgttcaattcgctgcccatttgcgttatggtcataaccaagccgcgcggggagtggcctcgcgcagataacgcgacaataaagggggtgcgcaatgaccaggttcaacactcagctcgtccacggactgccggttggagacaacaacaccggagccgtgaacccgccgatctacaactcgacgacatatgctttcgagagggtcgacgcgatgccccgttatgactatgcgcgcagcggcaatcccacacgcgacttcctggaacagcagatcgctcagctcgagcagggaacgcgtggttttgcgttcgcctcggggctggcggcgattcatgcggtactgagcattttcaagcccggtgaccgcatcgtggtcggtgacaatatttatggcggatcgtattcccagctcaatgagttcttcactcgctggggaatcatcgtcgaggccgtcgacactcaggacattgcagcattggaggccgccgtcaaaggcgaccgcgcgaacggcatcgcgcctgcccaagccgtctactttgaaaccctgaccaatccactgctcaaggtgaacgacgtacgcgccatctccacggtggcccaccgtttcggggcgctttcgattgtggacaacacgttcgtgaccccgtacctgcaaaagccgcttgcgctgggtgcggatgtggtgattcactccgccaccaagtatctggccggtcattctgatgtgaacgccggtctggtggtcgtttccggtgaggatctggcgaaccgcgtgtactttgcgcagaaccgtttgggtggtgtgttggctcccgctgagtgcgacgcggtacgccgcggcattcagactctggccctgcgcatggaccgtcagcaggagaacgccaatgccattgcctgctacctgctggtgcacccgctggtcaagtcggtgcattacccgggactgcccggtgccggcgatcagcatctggccgccaagggactcaagggtgccggcggcgtgctgagtttcgaggtggtgcccggtgttgaccctgcggatgtgctcaacaacctgcatttgttccggcttgcggtatcgttgggggctgtggagtctcttgccgagctgccctgtcgcatgacgcatttcgagctgccccgtgaggagcgcctgaagatcggcatcaccgatgagctggtgcgccttgccgttggcatcgaagacgccaacgatttgattgaggatcttggtcaggctttcgataccgcctacgcccgttacatcgatcgacatgccgatactgacgtgttccaacaactgacttcgggggtgttcgcctgatctgatacttttcctgcctatttctactcctggggagcggcgtcggttgtgccacaccggcgccgcttttttatgcctttgttcttgttgggccggggatgctgtcgggattatgcgagctgaatgtggtttttggttccgttcctcggtgggacttggcttttatggcgcagatgcagagagaaaaatcgactcgtggtggtatctccctgcaactcgcggatttcgtgccatgtaagaagggaatcacgtttttccgtgttatgtggcaaaccatcatcagggcaagactgcgtatgcattatgccagacgcgtatccatcacgtctcccgttatgatggacacgatctagcaaaacaggccgcgtgagagctgtacgcggcgaaacagaggaaaggacccgacatggccattgatatctacggtgctacatggtgcggtgactgccgtcaagccaagaacacgctcgacaagctgggggtggcatacacttggcacaacattgaggaagaggaaggcgctgccgaccgtgccgtggccatcagcggccagcagcacattccggttgtgttgtacggtgacggctcgttccaggtggagccctccgcagtggatatcaagaacaagctgcaggagttgggggagctgaccgactagggctcggtccaggaattacatgggatgcacgttcgcctgcttatgaatgttggatgagtgttcggggctcacgcgggctccggctgtttgtgcaatgcgggttggatctggtggaagttggtacattgtatgctagcggaaagatcacgctagcttcggggcgattctcttgacagcattactgactttcatttcgttggatctgaccgtcgaggtttacctttgacctcaacttttgagaatgaggtccaatgccttccggtatcggacctcattgcgcttatagggtatgacacagttagcgtgtgaggaatgttcgtgccgagacgaatgagacaactgcattgctgaaatcggtgtctccccgatacaccacgctacgttgctccgccggcatgcctaattcgttgccgaccgtcactagatgcttgcagaaatcatcacgcgcggtttgtccggatttgatctctatgagctgagggttgccgacatcggtcatatccatcagatcgacttcgacttggttgctgtcccgataaaaatacagttcgggctcttcgtccgcattgaggtgtttcttcagggtttcctcgatgatgaggttctcgaatacctcaccccgctttttgtgcaggacgagctgttcgacgctggtgatgccaagaagatagctcagcaaacccgtgtcgtaaaaatatagtttcgctgttttggttagacgcttgcgttcgttggaagcgtagggtggcaacataaaaataatgtagctggaagtgagaatggacagccactccttagcggtcttattgcttaccccagtctcgacggcaagtttactgatattgaccagctgtccggcgttttgcgcgcagagtttcaggaaagtgcggaaggactgtaggttgcggacgtcaagaatttccgcaacatcgcgctgaatgtatgtggtgatatagcttcggaaataggtggcttccggcatgtccactttatgaagatgaggatacccacctcgaaacataaacatatccggtgtgagatcaggattagcctgcatggcttcgcggtagctcagagggagcagctgcataataccgactcgaccagccaaagattcatcgacatgcttgagcagtaagaaattctgcgaccctgaaagcaaatattgacccatctcgtgtctctcgtcggcggcggcttggatttcggggaataggtcgggtgcatattgtgcttcatcgatgaataggtgagaggggcgtgaattgatgaatcctaccggatcgcgctgcgcagctatgcggagattccttgtttctaggttcagatattcataactggggaaagtatgccgaagcaaggtagatttgccactttggcgtggtcccatcactgacacgacaggaaaccatgtggccatttgttgtgctcgtgtgccgagcaatcgaggaatcatatgatctcctagtgtatgcagattaggaagtagaacttatgataattgagaagtaggatttatgcaaattaggaagtagagtttatgataatcaggtaatagagcttgtgtgaatgaggatgctgctcaacggagcctttgtctcggggctgatcccaataggatatgctgtttgttggcagaaagatcgcgtcaacttcgagacaaacttctaggcggcgccactgactttcgcctcgttggatctgaatgctgaggtttacctttgatctcgaattatgtgcagaaagggcctgacgttctaagacgtttggatctttcgtcgattaggtggacaacgattcgttccatcttgcgcagttgtcttcattctgagttctgtgtctgctgtgacaccgtctcttttttgaacatcactaatgcgttatcgacataataaccggttatcaaacgcaggaaataaatgagtcttcgccagtttgtgtggtgggaaagccccggcaacggacgccggggctttttcccacacacacaaactggcgaagactctaaaaaaatggacttgcgaaaatgggattgctgtttttgcgtatatagccaattcttataagaacacatcagcaattgcaatatcttcgtgccggtgtcacgcgtcaaggcttgctaagttcggaaatagaatttatggcggtaggggagagaattgatgagcgaaagtttccaaacacaagccatccacgccggatacgatccgctggttaacgggcgtatagccgccggcgtcagtgacaacctgattcgcctatccataggtttggaagatgtcaacgacctgatcgcagaccttgatcaggccatcgccgcagcatactgattggatgccgcacatcttttataagaagccagcatgcacacatagtgaacagttgtacacatatgcgtacgatgtctaccgctttgtttggacgctgatacgatggaaatcacgagtcgaggccgagggtggtttcgacgtggatgaagggaaaacatcatggccgtattctttgctggccggctgattgcattgctcattatcatcgtgctactcattgttctgctgagtgccgcactcttcgtcgtgccgcagcagcaggcctacatcattgagcgattcggcaagttccttaaggtgcagttcgcaggtattcatatccgcattccgtttgtggaccgtatcgctatgaaaaccaacatgcgtgtcaaccagcttaacgtgcagctggaaaccaagactcttgacaacgtgttcgtcaccgtggtggcctccactcagttccgcgtgaacccgaacgatgtggccaccgcttactacgagctgcgtgacccggccggtcagctgcgctcctacatggaggacgcgctgcgttccgctatccctgcactgtctttggacgatgcctttgcccgcaaggatgacgtggctttcgatgtgcagaagaccgtgggcaacgagatgagccggttcggcttcactgtggtcaagaccctgattaccgccatcgatccgagcccgcaggtcaagaacgccatggattccatcaacgccgcccagcgcgagaaggaagccacccgccagcgcgccgaggcccagcgcatccagatcgagacccaggccgccgccgaggcggagaagacccggctgcagggtgagggccaggccaactaccgccgcgaaatcgccaacggtatcgtcgaccagatcaagagtctgcaggccgtgggtatgaacatcaacgacgtgaacaacgtggtgctgttcaaccagtacctcgatgtgatgcgttcgctgtccgagtccggcaacgccaagaccgtggtgctgcccgcctccacgcctggcggctatcaggatctctacgaacaggtcaccaaggccatgctcaccgccaacgaaacgaagtaatcggcccatttgcaaccgcatccatcgttagtgaagcccctccaagcgaggggcttcactgcgtttcagctctgattccatatgaattgatatcgtcgcgaccggtttagatttcaacgagtgcgaaaattgactgtatgcagattgtaacgagtgcgcgaattacttacctatagattgcgacgagtgcataaagacggcatttatagaatttgataagtgtaaaataatgtgcgtcgttcatttgtgcaagccacaagtcctgatgatttgatgctgcgtatttctgttgccgcacaggggccgttggttgcagggaagacgctcatcttcattgatgaaattcaagcatgtccgcagattgtcacctttatcaaaggactggtggaccgaggagactatgactatattctttcgggttccctgctgggcgtagagctggaggatgtgcgctccctgcctgttggatatttggatgaatttatcatgtatccaatggattttgaagaattctgttgggcactgggactgtcggaaaccgtgttcgacatcgttcgtgacagttacggcaccgtaaaacccgttcctgattttgtccatcagcgtttaacagatttgttccaccggtatctgctagtcggtggtatgcctgctgcagtgacttcgtttgttgagagcaaggtcatcgatccagtgcgtgcggttcaaaccaacattcgtgcatattatgagcatgacattaagcagtatgcgccgaaggataaaaggctggttattcaggaaatgtatcgcctcatcccgagtgaattacaaagccgaaaccgcagattccaagtcagttccattgctgatgtgaagcggttctcgcagatcgaagatgaattcctttggcttactcgtgctaatgctgcgctgccggcatttagtgttgctgcccccgtggctccgctgagagccagtaaagaacgtcgattgctgaaactgttctattccgatgtaggattgctgaccagctcgtatggcaagaagtcagcactgggcatactggatggtcaggctgcaatgaacatgggcggagtctacgagaatgtcgtggcgcaggaactcaccgcgcatggatttaccaatctctattacttcacgaaaaaagggattggtgagctggatttcctgatagagaccgatgacggtgatgtgttggccctggagattaagccgggcaaatactaccgttctcatgcagcccttgacaatgcgctgaacactgacggctacgccattgacagggcgatagtactcgcggaaaccaacgtattccaagagaaaggaatcacctatctgccaatgtatatgctttcaatgctgattaatgagtaattgccaccttgccttgcaaactttctcgctgacggttgctcagtgagaaagtttgcaaaacttacttgctgaggaactcggggatggcctcggccgccgcatagcctttgcggtacatcatttccagaccctcgaagttcttttttagggtgttgagaccatagaggtcttccggggcgagaatcagcacgcggccttctgcctcatactgtttggccatctcgatttcgtcgttataggtcttgtaccgcatgcgcagcttttcagccgcggcggggtaagagcgttcgaggatacgggctggagccagatccttctgctgtttgcgcacttcgttgcgcagacgggagagaatcagaatcaccttgtcgtagccgtcatccaatgccttctgcaccgggactggatcggcgatgccgccgtcgaaatacggcacaccgtccactacatacggttcgcatgccactggcacagccgatgaggccttgatgacatcgaagtcatcgaatcgcgcacgcgacttgtcgaaatacttggtcgaaccgtcttcggcgttgcacgctaccacggtaaagccggtgggattggcctcgaaagccgcgtaatccaccgggttctcgccatcgtggttgctcagcgtgccgtagatatagtccaggttggcaaagttgtgatttttgaaataactttccgcgctcgcgtattccttacggaacgcgtacttggtatagaaagtgtggttgcgcccatgctggcgggcgatgaacgaggtcatattggctgcccccgcggacacgccgtaacacatgtccacatcaatgccatcttcgagcatgcgatccatcacgccgcagccgaaaatagcacgaaagccgccgcctacatcaatcattgcggtctttgccataccaaaccccctattttgttcaagtagtcatgagcttacgcgcgctgtttggacaaagatgtgggcaatggacccacgaaatgtctgtttatttgtcttggctcccctcaaagagggtggccaaggtcaggtactcagcaggtcatgcgacagcttggcaatgcgctcagatgggtcggaattggaaatctccacgcggccaagtgcatcctccggtgccagcttgcccaatgattccaataccacgccaaggtgacgaaccgtaccctcgttgccatcgatgattgcggcatgcttgggcagcagttcacggaaatagtcgcggtagaacacgaaatgcgtgcaccccaacaccacagaatcaatgcggtccaggtcatatcggtcaaagtagtggtgcagcgtgcgcatcaccagatcatgattgccaagctgaccggactccacaatctccaccaggtccgggcagggttccttgaaaatcgtgttatcggagtcgaaacgcttcataagctcggcgaatttccgctcacgcagggtcaggggagtagctgccacaatcacccgctgtggaatatgctgctggccgagaggggcgtccccgcggtcgcaagccactttcaatgccggctccatgccgatgatcggaatgtcataatgctcgcgcaaatcgttcaccgcggcggaggtagcggtattgcaggcaatgaccacggccttgacaccgtgttcaacgaatcgttccacgatgtcaaaacttaaggccttcacttgctccggggtcttgacgccgtacggggcgttggcggaatcgccgaaatacagcacgtgctcagccggcatgtccttggcgatttctcgggcaacggaaatgcctccaagccctgaatcaaagacgccgatgggcgctgatgagctcatgccagaatcctcctacaagactgcgtgccggtacgaaatgcccgaggccggccgtgcggccagtcccacactgttcacggaaacagtctgtgaacagtattgtttcgttccctagagtactctgaaagccatgagtcttccgcaacgagtaactaagacacacgcaaccggcaatgatttcgtggtgtacctcgacaaaaccggcgatttcgagcccactgccgatgagatacggttcctgtgcgaccgtcatttcggcatcggcggcgatggactgattcgcctgaccaagcctgagttcgtgtctgatctgagcgatgagcaaatcatggctgtgcaggcaggtgacgctgaatggttcatggactatcgcaatgcagacgggtcgttggctgagatgtgcggcaacggcacacgcgccatcactttattcgcccagcgtgagggcgtggctgactccaccgagccgttccgacttggaacccgagccggcgtcaagattctgacccctcgtggcaacgtgaagccgtatggtgccaatgtgttccaggtggaaatgggggagtggaaaatcggcgagaccgacgcctatgaagtcactattcccggcaacgatggctcggcacgtggcacgttcgtcgacatgggcaacccgcatgtggtggcggtgattgaagatgccttctccacgctgccagtggtcgaggatctggatttggttaccaagccggtggtcaacccaactatcgaatccgatcagaacgtggaattcgtgcgtattgatgatatcgaccacaacaccgcagtgggtgaggcgacgatgcgtgtcaacgaacgaggctgcggagagaccctctcctgcggtacgggcttgtgcgccacaggcattgtgctacgcgccaagaccggcatctcacactgggacatcaccgtgcgcggcggcactctgcgagtggacgtgaccgacgaggacgtcaaactcaccggctcggccacgctggttgccgatatcgatttgctccgttcctgacctccctctggtgagagaagcgccagccgtgaggctgatggaaggagagatacgtcgttattagccgcttatgcggcgaacagtgctgcgccctcggtgacgataatcagcactacaatcgccacaatccacagcacgtcaaccataaggtcgatgttgaggcggtaatacttgttcaacccggccggtatctgcggcatatcggaagcgatgccgttctcttcgtcagtgaccttgcgagacggcaatccctgcacggccacggttgcgtggctcaacgccatgaactggatggtggtggagaacatcagcgtcaagcaccacgggcatagcgcgtgaatcacgaacagcgactgcgtgctcaaccagtatgagtaggccaatgctgccaagccgccaaaccatgtgcaagtggcaaaccatcgcggcacgcgcacgcgcgccataccaatcacggcaatggtaatgaacactgattcggcggcgatgccgaagaacgcattcggataggagagcccgccgaatttcacgagttccgcctgccatgattgagccaccgtggaacaagagaccacggcatttacatcacatcccaatgaggactcaggatggcgtgccagctgcagcgtctcggccgaaagtatgaacgaggctcccaatgccactgccgaagcaatcagcatgatgagataagtccatgtggcgctgtgcctccagccagtgagccggggaattgaggcagtactggtatcgttacgtgcgccgtttgtgctgttcgtgtgcgtcatggaatcctccggtgtgggtactgcgctcaagattaaccgctgtggttgtcagataggaagagaatgttcggttttgcctggtagcgaatcgagttgcagacatgggaggggcgaaatgaggttacgatggacagtatgactggatacgtgatgcctatggaaccgcccacaaccgggtgggacatccattgccataccgccttctccgacggcacggagacgccggctgtgttggccgagcaatccaaggctgcggggcttaaaggtgtatccatttccgatcatgacactactgccggttggcctcaggccgaggccgcggcacgcaaggtagggctgccgctactgcgcggcactgaaatcacggccaccgatgacggtgtttccgtgcatatgctcggattccaatatgatcccacgaatcaatgcatcgtggatctgttcgcgcgtactcgccaggcacgattgcggcgtacgcaacgtatggtggaacttatgtccaaggaccttccgatttcatgggagtccgtgctcgcccaggtcaaggaaggcgggaacaccactataggacgcccgcatatcgccgatgcgctggttgcctccggggtgtatcaaaatcgttctgaggcgtttgccgatgcggtcagcgcgtcctccaaatattacattcccacgccgtcgccgaccgcgcgcgaggtggttgctgccgtgaagggggctgacggtgtgattctgattgctcatgccggtgatttgagccgaaaccggagactgctttccgatgagcagattgaagcgttgattgcggaagggctggatggcctggaagtgtggcatcgtggcaaccttcccgaacagcgcgaacgattgctgggcatttgcgcacgttaccatttgctggtcacaggcggatcggactggcatggtaagggcaaaccgaatctgttgggagagaacctgaccgatgaggccaccgtggccgaaatcgtccgacgcggcgcgctgccgttataccgatagcacaaagcctccgctctcgcggaggcttgctgtaagcccttgaacaatccgtatcgtcacagagcgccgaaaccgacggcgtgcttggtctcggaaccgatgatggcatagcccagtgccttggcgggcacgatgatgtgacgacccttatcatcggtcagattgatggtttcgtcgttggctacggcctgtgcgatagccttgccgacgctgtcggccgattcctcggtactgaagttcaccggtcgtgccacgttttggatgcccagttcgatgtccatgaatgctcctcgatggtgcccgtcgccgggcggttgattgttggctgtttccagccatatccgttggttctattgtgccgcgtaacgtcggcatgagatgaccggttacgcgctcggcgtggtttccggaactccacgtgaaggtgtgtcgtcctgaccgtcatgcaagggattgccctcgtcatcgtacccagccagtcctgtgcgagcgtcacgcaacgccctttcctcgcgctcaagcaagggaataaccgtggtctcagcaccagactgcgacaggcgatcattggtatcgtcatcagcctcgcccttgccggcatcctccacgttggcggaaggtgctgacgccgcctgctgatcgttcatctcaatgagctctttgagcgtgatggttaccgcgtcgtcaccttgctcggcattggcgggctgcggcttggttgagccagtgccggtcaccggactgccggcggtttgatcgttatcctcagcggcggcaggcacagccggggtcacgtctgcttctcccgcggcaacgacctcggccgagccggtacgatccggatcgggggtttcgtcggatggttccgtggtctcgttggtagtatcgtcagcctcggcgtagcggcggtcatcctcccgcagcaaagtgccgacggtaatggtggatggggaagcggacttggcagttgcgccagtggccggagcggccgtagacggcgtagtatcacggctgataacgcccagctgatgagcgagacgctcaacctgagccttaaactgcatgatgcgattattatccgcacgattcaatgcttggataaagtcgccgacctgctccatctgcaaccataggttggcacgcagcatgatcaggtcatcaaggcgagagcccatcatgcggccgtatgcggaaagcaccgcattgcggtgggattcgtcaagtttgccgaaaatccaggcaagatcgcgcgcaggatcattgacctgcatatcctgccaattggtcacggcagtaatagccgaacccgagaacaggaagtcgccgtctgagaagccgccatgcaccatgcacgtggagaacgaccataatccctcggtctctatgattcgcgcccaactattggtgatttcctgcggcacatgtcctgccgagcgcagacgcttaatccaggcggtcagttgcgaacgaatctggccagtggtgaacaccggatatttggcggccgagagaaatgccgttggcaggcgatgaatagcacccaatgcagtgccgaccgaagcgcagtcatcaagagtaagcaggtcaagcgagcgcgcctgtccctcgcggtgaaccgcaatcatcactgcagtttcccctgtcgggccgggcttacgggcgctctgagcctcgggctgatcagcggactgcgtggtcgtcgtctgcccgatctgaggctcgtcgccgggagtgaatgcaatgacatgatccaaatcgaatccaaggccacccggctcgcgggccaaggcaagcgtctgagccgcttgcacacgccgtgtcagacgagcgcgtccctctttggtgtcagtggcatatacgtcatacagtttgcctgaagcatcctgcaccactgcctgatcgatgcccttgccctcatcggttgcgctgggttgcgtgcttccgcgcacgcccgcgatggccagattcggcaggacagccgaggtaagcgctgccagcatatagttgctacgtttcatcactcttccacactaatacatgtccggctcttcatgacgtagttttcgcactggttttcggtttcgtgccacaatggaggtcatggaacaagcgcagcagattcttgaagggctcgatgagcagcagcgccgggcggcgactacgctgaatggcccggtgcgcatcatcgccggtgcaggcgcgggcaagacccgtaccgttacgcgacgcatcgcctatgcctgcgcgacgggagcatggaagcccgagcgggcgctggccgttacgttttcggtgaaagccgctgccgaaatgcgtgctcgacttgagcagctggggctgcaaggcggtacatccggtgttaccgccgctacttttcactctgcggcattgcgccagctcaacagtgtgtgggccgatgtctgtgaagcaccattcccgcatctcatcgaaaatcagcgtgacaccgtatctcgtgccatcactcgtgctaccgctgtacgagatattgatgcactgaccgtgcgcgatgtactggctgaaatcaattgggccaaaatttctctggtacccatcgatgattacgcgcgtatcagcgtagaggccaatcgtcagccgcccgcagggttcgatgccgctcgattcgccgctatctatgatgcgtatgagcaagagaaaacatcgcgaggagaaatcgattttgacgacatcctgctgctggtatgccacatcatggatgattttcccgaagcggcggcgcagattcgttcctccatcggctggctcaccgttgatgagtatcaggatgtttctccgctgcagcatcgtttgctgaacttatggcttgggggagacgggccgaatggcaaggccgctatgaaccgcaatgtatgtgtggtcggcgaccctgcacagaccatctactcgttcgcgggtgcatccagctggcatctgttgcagttcgccgatgagttcggccctctgtctgcagacatcaacctcagcaccgactaccgttcgactcctgaagtggtgggtctcgccaatcgggtgcttgccgcggcccccaatcgtgaggattatttgaagctggtttccgccagggagaagggggtacgcatcagccgaacggcctatgacaccgatgacctggaagcacaaggtgtggcggctcgcatcgcacgacttgttgcgcagggtgcgaagccctccgattgcgcgattctgacgcgcatcaacgcgcagcagccggttttcggtgcggcattgcgcgcggcaaggctgaaattccgcgtgcgtaaggattccggatggcagtcttcgtcgctcgcggatgatgccacgacacgcaaggccctgttggaagccatgggattggacgccacaggcagccagcagagcaccgaccccggcgtcatgatttccaccatccatgcggccaaaggtctggaattcaaacacgtctttctggtcggctgctccgaagggctattgccgtacgggtcaccggaaccgggggagacgttggaagaggagcgacggcttatgtacgtgggcgtcacacgagccgaggactcgctgcatctgtcatatgcgcggaccaaggatgggtatggggcgcagcagcgccgcccttcccgcttcttgtgaacattgcttcaagcagcttttcttcggctcgctcggtgtaaataatgtgccctaagcgatgacgatgccgtcactcattcggctgttgaggattgtcgggctggtccggggtatccgggccgtcgctgccatcttcgccgagcagtttggacagttcggcatcccagtcgatgttgtcggtcttgccatccgttgcagggtgcgaagtagcgctaccggcattgacggaggattgagacgaatcactcgattcggtcgcaacgccatccgcgggcttgtcaccaggcaaggccggcagcaaatccgggtgcgaccatttggcatcacgtccgtccggcccctcggccaccgtgatcatctcccacaggccggcggcttcacgcatgcgcttagggcgtagttgcaggccgagcaggctctcgaaagtgcgttccgctgggcctcccattgcacgctcgcggcgcatcatttcgcgcagctgctcgatatgcggaaggtgagccatgccggcacgccacaccacgcaatccacccagccttcaaccatggccagcaatgattccaacgatgccagcgcttcacgctgttcaggcgtatcggggatgcctactttggtgagattcaccgctccggaaatcgattcaggatccatggaagtggcatcgcgcagttgttcttccatggcatccaaatcaatggagatgccacgcgcatacttgccgatgagtgcttcaaaccggggcatcagccaaggaaccgaagcatagaggcgggcatgggccatttcctgcagcgcaaggaaagacagcacctcggactcgggaatcttttcgttggagtcgaatccggcgaatgcttcctcgaatgcggcggtgtctgcggcgtttgcgtcatccgaggactcggcggttgtgctggtttcgctcgaatcggaattgtcaatcgtgccagcactggttgcggccgaagtgaagccaatgggattggttgtttcacttgtctcgtcagtggcttccgcaggtgcctcgccattcagcaatttggcgtattcggtggcgttctgggctatcaggccaccggcagggttcttcagcagagagatgccctgatcgaagctgccatgcacttcatggctcagattgccagccgcatgacccagctgcatggcaaaggacgtgttgcccagcaatttcatgagttggccgggatccttcatgccgtcaggaatcggaatcggcactgggcctgcgaacatgccggccacttcgccgttgccaagcatgccgccgaggcgctcggaaatcaccgaggccaaagcgtcgttcatcgactcggccacgggagcggcgaatttggcccattggtcgatggtgccttccacccatccggcgcgggtgagcacatcgggctctccgggagcgggatcgaactcgcatgccgtgtccagccacagattcgcctcgctcatagcacgtcgagcggcttcaccgtccactgcggacacgctgggctgagagccggaagcgttggcctgttgcaatgcgattgatttggcgagcttgacgttgatcggtccctcttcgaccgtgcgctgcatatcgcccatggtgttcaggccgccggcactgaacgctgccatcatctgctggacttccgcaggatctggcagacggctcggatcctggctcatcatctgcgcgcgaatctcctctggcagctggccgatctgttgccaagccatttctccctgaatcgggccgaagcacttgatcagccattcgtgaatcgcgttgtcgtccatgcgtatccttctttgccgcggtgtgttatcccaagtgtaggttgtgcccgcgcccgttcgctggaggccgaggaatatgtgtgttgtgtgttcatttcggtcactcgcatacactgttgcatatgtctgtacgtcacacgaatcggcaatccgggtctttggccgctatggaagcccatccagaacacgatgattcggccgcgtcatcttccaactcatccaaggaaaccggacaatcgcgtttttcgcgcgccgcgcagagggtgaggcgatacctggcggctcgttctccgcgtcatttcatcggcgcgtttgccgtattgctcggtgtggtgatactactgctgcccagcccgtatgtcatcgaggggccggggccgacccagaatgtgctcggtagcgtcgaggacggcgcagtcattgatgtatccggcaaaggcgtttccacgtaccaagattccggctcattgctgttgaccacggtcaacgcttccggcgtgcccggctacacgattatcaatgcacaggccgtgtgggcatgggcgaacccgaagatggagatcatgccaagggaagcgacggtgccagtggggcagacggccgacgaatatcagaagacggtcgacaaggacatggccggttcccagtcctcggccagcgaagtgggattggcgtatgccaaagcacacgccgatgagttgggcattgatgccgcatcgctcgcccatgccaaggtgacgatgcatgtggatagcatcggcgggccgtccgccggcatgatgtacacgctgggccttatcgacaagctgactcccgagagtgaaagtggcggcaagaccatcgccggcacgggcactatcgacaagaagggcaatgtcggcaaaatcggcggcattcagctgaagatggttggagccaaacgcgacggtgccacatggttcttggctcctgcggataattgcagcgcggtggcaggccatgtgcccgacgggctgcgcgatgtcaaggtcgccaccttggacgaggcctatcgggcactggtggccatcggtaaaggacaggccgacgacttgccgcattgcacggcgtgagcgcttggaattttgcggtgaaacggtcacaaagcgagatttttggtcgcgttaacgtatttgttcgccatgacttgctaatgtagcccctgtgaatcaaacggcatcgcagaacgctgaagaatttggtttcaagcccggcgacatcgtccaggagtggctctgggacgacgacgtggacgactccgtacgcgccaagatcgaggagctcacgggtgaggagcttgtagacgaggattatgactccgccgtggatggtgtcattctgtggtggcgcgatggcgacgacgaggacgaactgtccgataccatcgtcgatgcctacgcggtgctcggcaatgacggcccattgtgggtgttgacgccgaagcccggtcgtccgggagccgccagctcttccaccgtgcagtccgccgcccagaccgcaggcatgaacgccgccactccgctgactgtcagcccggactggaatggcatccgtctgcgcgctttcggcaagggccgctgaatcggaacgacgggcggaagccatggccttggtgaaaggtcatgattacggcgtccggcgtgtgcaagtgacggctgtgccgtccttacgctattgttgatactcgcgggcaattagctcagttggttagagcgccacctttacacggtggatgtcaggggttcgagtcccttattgcccactttcactgcgctttcgaaatgaggccgaccagtgtcgagaaggccaaaaactgtgaatttccgcctaaatacacgcgcgcgtcgcaacaatcacgtacagttgtggacagatttgtttatccagcaggaggtcgattagccgatggcgcaggaacttcgcgaaggggacggcaaggcaggcattgcacgcgcaggcaagcgtaagtggggatatgatcccgctcaggtcgacgcttttctagagcgggcccacgctttgtacgacagtgagggaatcagacttacccagcgtgatattcagtcggtgtcgttcgacctgaccaaggacggctatgtgattgctcaggtcgacgcagcgcttaatcgtctcgagcgtgcggtggtcgacaagcagaccgcatgggagatcgcccagcatggtcgtgtgacgtggaaggcacagactgagaacctgtaccagcagattctcgagcatgtggaacgtgagcagggcgagcgcttcaagcccggtgaggccaagcagccgtcgtatgacaagaagcaggtcgaccgtcttaccgatcagattgtggataaagtcgctgcatccctcggcgtcgacggtgtcaccgaagacgatgtccgtgacttggctgatctcaacgccgtttcggtgagcaatgtcatcttcacccagcgcaagggcaagaagggctatgacgagcgtcaggtcgactatttcctaaacgcgtgcgtccagttgctcagccgtattgagtcctacgctcgagtcggtggcgcttccgccaacgagccagccgctgctgcggccccggctcccgcagcagcggtggcagccccggcggaagccgtttcgccgttgttcgctgccaatgcacagcgcccggctgctgacgcacgtttcgcacctcaggccgccgcctctgatgatgcgttcgatgctttgcatcaggccgaacagaatctgtttgtggctcgtcctgcagctgagcaggccgataacgcgtctgctccagcggcatatcagccggcgtcatacgcacctgcttcgtccgcagcaccgcagcctgtggcctccgatgcaccgtcgttcggagcaaaatctgcccccgcggccccgtctactccggcggttcctgcggttcctgtggctccggcagctccggtgaccccggtagttcctgcggtccctccgacggctgagagcgattcctcgctggccgccttggcccatatggcgcaagcctcacaggatatccctgcggtgagcgtgccgtcttttgaacccaagatgccgagtctgggcacgccggaagaactgaaattgaacgatatgccggctcctgttactccggctgccgcaccggttactgccgcatccgccgctcctgcagcgccgagcgaagcccctgcaacaccggagccgccgcacgcgcagacgcgtcatcagcctgcgcctgagaccatgccggtctcctttgcgccggccaacaagccggtgcgcaccaccggatccgttccgattccggttgccgaccattctgatgatgtgccggccgagcccgtgagcacaccgaagccggcagcccagcccagcaaggatgccgagacaaagcgtccggaacagatttccgacatgccgttcccctcgctgttcccaaccagcgatgatttcaattcaagcatcccggatctgtctttcccgacgctggatcatgatgatacgaagaaggaacagtgagcgtagtctccaactccaccgtcgtaattcttggatctaccggatccatcggcacacaaggccttgatgtcattgcacgccatcctgagcgtttcactgttacgggtttggccgccggcggcgctcatatcgaattgctggctcgtcaggccgcacaattccgtgtaccggaagttgcggtattcgacagcaccaagattccggcactgaaggaggcgctgcaacaggccggtgcccgcgacacccgcgtgaccggcggaccggatgccgtgatcgcattggcaggttccggtgcgaacgtcgtgctgaacggcattaccggttccattggtctcgagccgtccatcgccgcgctgaaagccgattcacagcttgcactggccaataaggaatcagtggtggccggcggtcatctgctgttcagcgcgcaagtgcgcgacgatcagatcaatccggttgactccgaacattccgccatctggcagtcgttgcgttccggcacccatgccgaggtctccaagctggtggtcacagcctccggtggtccgttccgaggctggaaacgtgctgatatggcgaatatcacgcctgagcaggcgttgcatcatccgacgtggaacatgggtccggttgtgaccatcaactcctcgaccctgatgaacaagggactcgaggttattgaggcttcccgactgttcgatgtgccgccggaccgtattgacgtaacggtgcacccgcaatccattgtccattccatggtcgaattcgtggatggcgccactatttgccagtcttcgccgccggacatgcgcctgcccatcgcgctcggcttgtccgcgcctgaccgcatggacaatgtggctgccgcatgtgactggacgcaggctgcaacctggacgttcgagccgctggataatgaggcgttccccgccgtccagctcgcccgccattgcctgggtgcatccgaaaaacatacggccgtgctcaacgcggccaatgagcaggccgtgcacgccttcctcgaccatcgtctgccgtaccttggcatcgtggacacggtgaaggccgtgctcgaccagatggatgccgaactgcgtggcaacccgctgttcacggacgtggaggaaatgggacagattgagcttgaagctcgtcaccgtgccgatgatttgataaacaaacaatgatgaatgccttgaatacggaaaaatccgccgaaaaaccgttccgcaaaaccggtaatccggtcgaattgaccagcgaatcgccgctgcacccgcgtcgcaagtctcgccgcatcatggtcggctcggtgccggtcggtgggggagcccccatctccgtgcagtcgatgaccaacacgcttacggccaatgttcctgccacattgcagcagattgccgagctgaccgcagctggttgcgatatcgtgcgcgtggctgtgccgagtcaggacgatgccgacgcattgccggagatctgcaggaagtcgccggtgccgatcatcgcggatattcacttccagtccaagtacgtgttccaggccatcgatgccggctgcgcagccgtacgcgtgaaccccggcaacatccgtaaattcaatgaagtcggcccctcgatctgcaaagcagccactgatgccggcatctctctgcgtatcggtgtgaacgccggctcgttggacaaggaactctacgccaaatacggcggccccactcctgaagcattggtggcctccgcattgaaggaagctcacatgttcgaggacgtcggcttccatgatttcaagatttccgtcaagcaccatgacgtgatcaccatggtcgaaacctatcgtctgcttgcctccaagggtgactggccgctgcacctcggcgtcaccgaagccggtccggcctggcagggcaccatcaaatcctgcctggcgttcggcgcactactcgccgaaggcatcggagatacgattcgcgtctcgctgtccgccccgccggtcgaagaggtcaaggtgggctgcaagctccttgaatacatgggattgcgcccgcgcaagttcgacatcatctcctgcccgagctgcggacgagcccaggtggatgtgattcagcttgcctcggccgtgaccgaggggctgaaggacgtgaccgcgccgattcgcgtggccgttatgggttgcatcgtcaacggccccggcgaagcccgcgaggccgacctcggcgtggcttccggcaacggcaagggacagatcttcatcaagggcaaggtcatcgagaccgtgcccgaagaccagatcgtagacacgttgcttaccaaggcgcaggaaatcgccgcccaaatggaggccgatggcctggttcccgtcaacgccaccggtccggtggtggttcccattcagcatcccaatcgctgaatgcgccccacggcataattaccgtggaacggctacaataacctttcgtgccacaagaagagcagcgtctgaccgtgaaggccaagccgtggaccagcctccaccggctcatggtcagtctgcccatcttcatcatgctgatgggcgtgctggtctctatctccaatctcactaccgtgccatggaatatcgagcccaccggccaatccatggccacgcttaccgatgatacggacgtcacttttgccaatccgaccggcgaagcattgcccagtaaaggcacctatcaggtcagtgaacggtatatcaccctgaatatgaccagcgacggcaacctgactcaagagaccggagtgcgcggcaaggccaacaagaacggcgtgcagaccatcaaggtgcttattcgcgagccgcagggagctgccggcaaacgaccgggtgtggtgttcatgcacggtgccggttacggcacttgtgataactcatttggcgatgtggcctccgacatggcttcagccggttttgtgaccgcagtactcgataaaccagtttggaacaccaccgacgtcaaccgcgactacatggcctccgccaaagcctatgatcaggtgattgcatatttgcggcagcttgagaacgtcgacaatgccaaggtcggcatttacgccacgtccgaatccacttggatatcctcatacctgctgcaggatgacccggatgtcgctttccagattctcttgagtccgatggtattcagcccacgccagtcgttgggcttcttcgtcacccaggactttacgcttgccggtgcgaatgatggctatcagtccattgtccagcgtgtgttcagcgcggacaccgatttgttctcgctgacgaatttcgatcttgatacgctcaaacctgccgcctacgccgttcccacttttgtggcctatgggtcgaaggatgtgatgaccgcacaggtcgatggtgtgcgcgcgattctgcacaacgcgcaccaggccaacaactgggatgtgaccgtacgcagttatcccgtggccaaccacgtgctccgcttgggggacgagtcggaggccggaactccattcgcggatgcctatgtgaatgacctgatcgactgggcggtaggtaccacggcaggctatacgcaaaccagtgaacgcgtggccggcgctggcctgtaccagtcgattgggttgccgggagcgttgaaagcccgtcgggtgggaaccatatacggcgtgatcgtgcatgtcgccgttgtgctgctgcttatggcctcaacgatattgggattggtagcgcttggccgcaagatcgcgttgaacgcacagtggcggcgcaatcggagggaggcaaagcgggctggcatgctcctgcctgccaagcccgtggtattgggtttcgcccatggtttcggcggatcgttgctgacgcttacccttaccacgctggccgcgatgctgatcttctttgccggactaggccaagtgattatgggcgtggtcaaacttgcctggggtggcgcgcccacggaaacgcccggggtgatgtattggagctggccggtgatccaagtggtgtctgtgctggtggtctgggcatggtctcgcgtgttcatgaggcttatagaggtggcctggcatcgtggccttatccagttgccgcccaggcgcgaggcggttcgtaatatcgtcaccggtgccgaaccggtgctcgcctccactcgacttggccgcgtactgttctggctggtggcgttcactatgctgaacgtgttgttgttcttcgcgttctggggtctgttcgtttactgacatatggcgcaaacgttgcgaaaggagggatgatgccgctgtaccgagatgaaggcgtggtgttgagaaccgccaaacttggtgaggccgatcgcatcatcaccctgctgacgcgcgagcatggcaagattcgagccgtggccaaaggcgtacgacgtactaaatcacggttcggggcacgccttgaaccgttcatgcgcgtggatctgcttattgctgagggccgttcgctggacgtcgtttcacaagctgaatccgtcgcttcgtatggtgccgcaatagctgccgattatgcggcgtacgaggctgccaacgtcattgtggagaccattgataagctcgtcagcaccgagcatgagcaattgccgaaccagtatcggctgcttatcggtgcattgaatgcgctcgccaaacatgctcatgcatcgcagaccatcagcgagtcctacgtgatgagggccctggcgctggccggctggacgccgcgtctcgccacttgcgtggtgtgcggcaagcccgagcgccgttacttctccatcgcgtcaggcggtgtgatgtgcgaggccgaccacaccaccgatgcccgacgtatcgcgccgcttgtattgagtcagcttgatgccctgattcgaggcgactggtcggtgcttgataacgcgccattggagcgtattgtgcaagagttggttgaagattggggggagtattacctcgaacggccgattcgttcgctgcgcttgatagattcatgagtatggcttttgagaacgttgattacacgtcgttggacatccccgcagctccgttcagcgacccctcccgtatccctgatttccccaaaaacaaagtgccccggcatgtgggtgtgattatggacggcaatggccgttgggccaagcagcgcggcatgatccgcaccaatggccatcaagcggctgagccggtggtgttcgacaccattgccggtgccatagaggccggtgtgcgctatctaagcctgtatacgttctccactgaaaactggaaacgatcgccgcaagaggtgcgtttcctgatgggcttctcccgcgagattatccatcgccgagtggcgcagatggatgaatggggcgtgcgtgtgcgctggtcgggccgccgtccgaagctgtggaagtcggtgattgacgagcttgaagtggcaatggaacgcaccaagaacaacaaggtcatcgatgtggtgttctgcatcaactatggtggtcgtgccgagattgccgatgcctgtgcagccattgcacgagaggtgcgtgacggccgaatttccggagaccgcgtcaccgagaagatggttgccgatcatctctataatccggatatccctgattgcgacttggtgattcgcacttccggcgagcagcgtacctccaacttcctgccgtggcaggccgcgtacgccgagctggactttgtacctgaactgttccctgactgcggccgtgaggtgctctggcgcgccattgacaactacattcaccgcgatcgtcgattcggcggcgtgaagtaaagaacagccctgcgggctgttctttcacgccgccgagccgggcgcggtagtgtgcggctcggcgtgttgagtccggcgaagccggtcctaattgctggggacgtgaagtaaggaacgagctactcgctgatatccgcgtcggctccattgccgagcagcagccattcgaccagtgaaatcagccctagcagtattgcggtttcggcgatcaccactacagtggcggagaagatcagcggagtacggaacgaattgaacgcagcttgcagccaaatgcccaggccgttcattgcgcccagatattcggcggtggccgccgttccgaaaatgtaggcggccgagatgcgaatgccgccaaagatctggcgtgcggctacacgcagcttaacgtgccagagtgcccatgcacgtgtggctccgcaggtcagtgccacgtcttcgtaaaattgcggcacggcggtcagtccacgggcggtctgcacggcgatgggaaatacgccgaacacggcgacaataacgattttgcccagtggctcgaatccgaaccaaatcatgaacaacggagccacggtaatcaatggaatggtctgtgcggccaccagcagcggatagaacgcacggtgcagggttttggataggtacagcccgatgccaatgagcacgcccgctacgatggcgatggcaaatccagtgagagcctcatatgtggtgatggcggcggcatccatcaaattcggccaagtgcgcaccatggaggcgatgatctgggtgggggaagcaagtacacgttccgagacatgtcccgcgcgtacggccgcctcccacaccaccagcaaaagaccgatggtaatggccggtggcgctatacgcaccaaccacgacttgagattgttcatcatttgccttcgaaaaatataaatggctcccctcaagaatgaggggagccggcctccctacagtcgctcagtccacgtagtcgttagtggcgagttccttggcctgcggagcctgcttggggttcttgccgtccttgtcctggtaggtgccggccttgtactggaagtcaaggtaaggctgggcgtcatcgaagttcacggtgccgggcagcgacttggcatcatcggtggtccagtagccgttcttgacgatctcttccatcgaggtacgggtcagcttggaatccagctgggcttccttggcctgcgccacgagaatattggcggccttgtccgggttggacagggcgtagtcgtagcccttcttggtggcggagaggaacttcttcaatgcgtcggcgttggcggaatccttaagccaagagcccttgaccgcaaagccgagctggtccgggttgccgggaacgccccaatcggaggcaacgaagcagttgagcgccgggccgttcagctcgctttccacaccctcccaagtcacgtagaagccgccgaagtcacccttgccgctagtaagggtctcgaaggtgttcgtgccggcggtggcggtcttgaattcgccggtgccgcctgcatccttaatcatctcacgcaccacggcgttctgctctgccgagccgaagctcacgaaggttttgccggacaggtctgccggcgtcttgatgtcggtacgggaggtcaatgcgcaccagcgggccacgggcttttgcgtcagatcaaagacgaatttcagatcggagccttgcgagttgaatgcggccacattgctcagcgtggtgaaaccgacgtttgccacaccgttctccacactggtttccgcgccggcctgagcggtcggcagaatcttcacgttgactcctgcgtccttgaagtagccgagcttctgggccacgtacaggccgatatggttcgtgttcggcgtccaatcaagcatgaacgaaacggtgggtgtactggaattgctggaatcggcggtgttggcgttgccgcatgccgcaacggacaggccgagcgtggcggctcccaacatggccaccatcctgaccagacccttcttgacttcaatcctcatcttcatgtcaccttgccttctgcgcataatgcgctcaaggtctgatgcatcgtaaagcggaaaggtgaggagcccgcgcgaaacatcaaaccgtacgccacgcgcataagcgagggcgtgtattccaaatgatatcggcacggttgctgccaccaaccgcgcgaacgactcaccagtatagccgtatggctggaagcgcaagcatgctgctttggtctcgaaccgtggcaagggtcggggttgccacgctctatcgtagggagatatgagcgtgcatttctcctcccgagtggatatttccgatccgaatccgattgcggccgccgaggctgcggccagggcaaacggtactgcgctgggcaagctcaatgattccaatccgacgcggcatggactggctcccgcactggtaccgagcgtatatacggccgatccgcgcggatcgtacgcggttcgtgaagctctggctgcattcctgaacgaagccaatgcggaccgctcccagatgaacgcatcagcgaataccgccagcaggggcgtgaagccggagcaattgtatgtgttgagctccacatccgaggcatactcatggctgatcaaactgttatgtgatgccggagatgcagtgttggcccccaagccgggatacccgctgatcgagtcgatcgcccggcttgaatgcgtggataccgtcgaataccagttgcggttcgacggctcttggttcattgacgtggccgagctggagcaattgcttgacggaccgagcggcgctcgtattcgtgcattggtactgattaatccgaataatccgaccggatcctatgtcaagccggccgagcgggaacgtatcgtgacgatgtgctgggagcgaggcatcgcccttattgccgatgaagtgttctttgattatgcccttgagccatttgccagcaacgcgcgtttggccggagagcagggtgtgcttacctttgcgcttaacgggttctccaaaatgctggcggcgcctcatgccaaagtcgggtggattcaggtgtccgggccggccgaggatgttgcgcaagcccagcgccgacttgatgtcatagccgacgattacctgccgatgagtgacatcatcgcacagcggattccggcgctgttggaggccgcgactgagcaaaccgcgcgtgtggaggaacgagtgcgcggcaatctcgcgactttgcacgagctgctggatgcggacccgaatgggttggtcagcgtgctgcgagccgagggcggctggaacgtgctgctgcgcgtgccgtccgtgattgacgagaacgagatggtgctgaagctcatcgccgagcatggcctgaccggacagcctggatatttctttgatatgacctccaacggctatttggcggtttcgctgctgcctgagccggaagtgtttagacaaggcatttgcgccgtgctcgccactgtggaggcgttgctggcataatgggcggcatgggattcttttttcagtccaaagagctgccgcgcccggcttcgctgacgttcaccttgaaagaagccggccatacctatgatgatgggcatgttggccttgcgcccaccatgctgaccatcagcgaacagcgcgtggctgtgatcggcctgaatggagctggtaaatccacattgttgggattgctcgatggctctcttaaagccaatatcggcacggttatggtgtccggcggcagcgaacaactgaacccagccgtgaaaaaagacctgaagcgcattgacgaccttgtcggtaaagtgcgtcgcgaggagattccgaacagcttctaccgggccgcgaatatctccgaagcggtgtccgaagcactgaaaaagcacaaggtgccggagtccgaacgccatgcgcgtatcggcaatctgttcgcgcatttcaatctggcacaggtctccaaggccaaggccagcgagcttgactccgagaaacgacatctgctggccattgccgccgcattgagctttgagcccagtgcaatcgtggctgacgagcccagcaagggtttggatgagattggcaccgcacacgtggccaaggcattgttcagctacaacaagcaggtcatcttcgccacgcatgacacggatatgattcgccagcccgaatacgcaatcgaccgcgtactcgtactggacgagcacgcggtcgtgtgcgatgacacgccggccgcagccgtggcgttttatgaggatctgattcgacgcaagtacgaggcctccaagcggtaatgctcccctcagtcacctgcggtgacagctcccctcagagaggggagccaagggtgcgtcgctcggtcgcaggccgatgtcgctacgcgaagtagaacccccggaagccgtactcatagacgcggtagatttgcgcgttgagccgatctacacgacgttccttgatggaggcgctgacatcatcctgcgagaacaggcataggccaatggcgatggctgctgcggatattttgaaaacacgacttcggacggcagtagacacagggaattctcatggtactacagatgaacaacagtgaattacatcacatatactatgccgcgggtcttggagaaaactgcctgcaatactgggaatatgctggacggccggtagggtgcgaccgtggcctggctacagcagcgtaaaccaggactgaacctggtgccacagcgcggcattattcgtcagcatggagtcatcgcgggcgggagcaaagcaccctagtatggcgacggccaacgtccagatcagcatgatgagtacggtccatcgcatcagccaacgccatggagtgacacgggcgatgccgtcgccggatgcggcgtcgttcgcgccggccaacgaggtgctgggctctcggccgttgaccagccacagcagtcccggaatcgaagcgagcgccaccagccagccgaaatcagccaaatatcgccagcccagaccgcccacataactgtcgaacaccaccagtacgccggccagagccaaacaagacatgagccaacgacgcatgccatgcatctccagcttatgcaggaacggcagcactaatgcaagcagcatcagcggcgtggcggtgaacagtgcgccgaccatcacctcgtaatagccccaaaccggcattggcgcgggggagaccgccagccacgggaagtttcgtacaaatcgcaccggcaggaacaggtaataccagacggtggccggcatgtcggcaatcggggtggcataacgggtcatgtcggagacggtgaattggtaggcgttgccgaagtcgatcagactgccgaagcgcactttgttccacaacatcagcggaatgaccacaaccaatgcaggtatcaccatggcaagcggcgcgcgcaacgctttgagcatggtaatgcgtcgatgcgcaagatcgctgatcatagcgcggatctgcggccagaacagggcgatggccagcagggccgtgagcgcaaaggtcggtcggcaaccgaagttcgccgcgatgcatagggcgccgacggccagtcgcggcaaagacagtggctgtgtgttgccggcttgccagcggtcggacggcattagtgggcgactggatgtatccgcacccagccagaaccataatcccagtgaagtcaacgccagagaagcggcgaagggcacttggtagaagttggtgcggtaagccagatatcccatttgcgccccgagcagcgcactgacggtgatgagcgaggcggcggccaatgatgtttttgacatcacgcggtgaatcacacgcagtacgagcagggagaagaagatgatgaacagcagcaccaggaactgttcggctgcggcggtcggcaacatatgcccggtaatcagacgatacggcacgaacagcaacacggcaggcagcacgccgaagtaggagtaccagtggccttcgtagtaggcgtaatcccaatacatcgggctgaccccatcctccaacagtttgagacgagtcggcacatcataggggtgagtgctttgggccagttgtccgggtacgtcaaggtcaagccatggacggcctgcgattagggaatcggccacatgaccgtactggtcgaaatcataggtgtagccgcctgcggtatggaaggcgagcggcatggcatgcgtgagctgccagatgatggaagcgccgatggccagtgtcggaatcgccgcaatggccgcgaacgccagccgctggcgtgtgctggagggatcaaacgtgatacgccacaatcgagagccgggcctccatatggcgaccagcaacgccagcgcggccattgccgcgacgcggatccaatcgatggcaaaaggcacgtgcacgttcgcgcgtgcgtcggcgatcggcacaattgcgccgcgttcctcctggatccagatgcgtacggtgcctgcacccacagctttgacataatggctgcgtgaggtgccgggattcatcgaaatggcttggccggtactgccgttcacatccacgcgcacatggatggtgtccagtggcttgaacaccgccttgtccccattggcccgtgattcggcctcggcctgttcgtgaaccgcatcgatggtgtcgtgcgagggggagtcgatgcgcagatatgctgaagtgccgtctgcggccagttcgagatatgccttggtcggatcggtgacggtcagcatatcgtcatcggtgcgcaccaggcccgggcccaaggtgttatgcacggcgttggtgtcggtgctggcccccagtgtgcgccagaatggcaggttgaagacaatgcactccatgccgacgatgatggccgcaacagccagtagcgccgcaagcgggcgccacgacaatcggcggtgtacacgactggtgagatgactgtcttcggaatgcaccccattattctataggctttatgtcgggcaaacagtagagaatgtgaatcatgccaaaacgtatgtcgaatcacagtgaacggtccggcccgtccttcttgagcgggctgaaggattcgatgaacgcgcttgcctccgatctgggcttatccaagcctcgtcaggccagcaccaacccgtttggcgatgcgttgagcgaggccagcgagcgcaagggcggcatcatcgatgaactgaccaagcatgcggtgtcgctgagcccggtggtcaagaggcgttcgtttcccgccttggaaaatgttcccgagggactggtgctgggatgggcgcaactgccttccacgcgggggcgcggattctccttgggtatcttccccgatcgggatcactttgcgcaggtggcgtttgccgatacccatggtcgcgtgtttgtgggcgccgatttggatatggatatccaggatatgcagccgcgcttcatgttcggcaaggaaaaggaagtgaccctgccgaacggcgggcggttgggctttgatgcggggcagatccgtcgcaatgtgctgggccgcgcgattcgcagcaatggcgaggtgaaggccatcaccggaggcgtgatcgggcgtgacgacaccggtcgtatgacgtggctcgcctcgtggcttaaggccggcaaccggtacaccttggagcagatgcgcgccaatctgccggctgatatgcgtcatgatctggaataccgtgatgccgtggccattgcgttcttcgccgcctacatgctgccgcaaatcaatgggctgttgataggttttggttccggcaatattttccgccgtctcaatcgcgaggctcccatcggtgcgatcaggcgttcgattcgcgacacgatggaggctcgtgcgcacggcatgcgtgcctctggcctggaggatcattttgcggatctgatgcgtgaagccggggcgcttgataacacgccgggcttggaagccgtgcatggcgccgagccgctgcatttgtatacttcgacgtactcgagcggctatttcttcacgtgggataagtcgttggccttcaatcaggcactgaagtccctgaaaatcgagggcaatctcaatcgttttgccgcggtgagcgcctggctggagcgcaattcctcgcgtgggctcaatcccacggaagacacggtaacccgtgccgaggccgcgcagatcgatatgaagctcatcgaaaaccccgcgattatggcgctcaacccgtatgacggatccgatgaacgccgtgcggtgctgagcctggtcaatgcggccgagcacgccgcagaccggattcgtgaggagttccccgacccaaggaatgcggcgccgaaagcggacgaatgggtgtatcgacagacattgtcgtccctgctgcgcagattgcgtctaccgtatcggtttgatgtcgagtttcgttcccgactggattcgggggaagtggccatcggcttcaccacggcgggcacgtcgatgatgccggatagcagatatgacaccgaacggcgcacgtggagaacgctgagcagcgtcgagcgcgcatcgatgagcgcctcctacaacttgcgcgtcggcctgatgatggcggcgctgagcttcggcaccagtcaagccgtgcatcaggtgtctctgcacatcgattccatcggtttggaagaggcgattgccgagcaggactcggccatcgaagagatgatgagcgaggcgttaagcgctttcgagcatttgcgcagcggcgatttgggacgtgtcagttccaaggctgatcccaaggatggcgatttccatggcgatccgacccgaccgatcacgcatgaggagacctttgggcagccgcccactggcaccggtgatgagcagcctgcaacggacgcggagacggatggggcgggcccgtctcagcagaatgccgaagacagcgacgacagcgcatccatcgactcccagttcgaagaccttatgcggggcatagatattgacgagatggctttcggcatggcgtcggatgacggcaacgaaaccgagaatgcgggtgcgggtgatgatccgatgagcgtgctgcgccgtaaccccaccgtgcgcaacatggtcaccgtcacattcgccagggatgccttcctgcaacgtctcgacaccgatggtcttgaccaccctgaagaaacctaccggatgtttggtgcggtgatggatgtcgacggcgagggcggactcaagcccatcaacgccgacttcgacttggccgatagccggttctcgcccgtcggctcccaagaggagccggaacttgccgaccgtcagttcaacgcgtcgaccgcgcgagtactgggtgcgcagaatagcgctggtctggcgattcagcgtgtggacctgctgcagcatggcgtcaatgcgttccacgacatcgcccgtaatacggaacttgattccgtggagaaagcgcagcgggccatgcagatcatcgaatccatcagcgatcccgaactgacgggtctggcctcgcaggtcaccagtgcgctgattgatggcaacgatacgccggactttgtcttcactcttgccgacgagctggataaggaacgtctgcgcgctcgcgatctgctgttctccggacaggccgatcaggccattgagatggccgaagcggctgcggcccgtatggaccagacctttgccatggggtctggagtgccacgatacttcaattcctatgccgaacgagtggtgtacaaccgcctgttcgccacattggatgagcgcacggttctgattcctgacaatctgttctatgcacatatggaactagctgatgtgctgggacagctcaaaggcgccaaagccgcgattccacacctgaatcgtatggtggcctacgcgcccgcctatccgctgtcgcacctgaaattggccattcaactggcccgcaatgaggattgggattcggcgcgcgccgcctgcctgaatgccttgcgagtggctctggatcgtgatgatgcggcgttcgcctattaccgtttcgcctatgcggagtggatgctggaccgattcgatacggctgccgcagcctacattatgagcgaccatattgcacctggagcaatcggatcgctggagagcgagttacaggagctggtctcccgagccgattcgcaatgcatccgtgtgccggaatcggtggagagcgcggcgcaagtgttgtcttcgcatgatctgccggtctggccgcacattgaagtggccgatatcgtgcgtgatgccgctcgtgtatgcgtcgatgagggcatgtttgtgcctgcccgcacgctttcggtggctgttgcccgtatgaatgatggcgaaggcgacaatatcgacgttatccaggcccaattccttcgttccctttctgcgtagccgtttcagggggagttcgcccgctaggatagacaatcatgagcacgaacgaacagttggcatgggatttcgacgatggggatgcggccgaggtccggcccgacgaaggcgttacccgctttgcccccggttccgagcagtgggtggccgcgcttgacgccaccgatgatgacgcgatgcggctcgatcgtcttgacgtcaatacgctcaatgccgaggtcgcggcgcgtctgtgggctcgtgtggccgcttgggtggaggccgaccagatcgcctactacatcgatgatgcgcccgtcagctccgatgccgcctatgatgcgcgcctgcgttgcctgcaaaagcttgaggcggcgttcccctcgctggacaatccacagtcgcccacccatcgagttggcggctcgttctccaacgatttcacttccgtgcggcatccaagccgcatgatgagccttgatgatgtcttttctatcgaggaactcaaggactggtacgattcggtgattcgcgatctcgattggccggacggcaagccgttgccaatgagctgcgaggtcaaaatcgatggtctggcattgaatctcatctatcgaggcggcgtgctggagcaggggctgactcgtggcgatggcgtcaccggtgaagacatcacactgaacgtgcgcactatcggctccatcccggcgcagcttggtgggcctaaagaggatattccggacttcgtggaaatccgcggcgaagtgttcatgcgttgggatgattttcatacactcaataacgagcaggaggatgcaggccgagcgcttttcgccaatccgcgcaacgccgcagccggttcgttgaggcagaaggatccgcgcatcaccgccactcgccggctgagcttttatgcgcatggtttagggcagctcacttggggacctgatcatcctcgtggcacccatgacgtgatagccgaccaatcgcaagcctatgatttgtatgccaagtggggcgtgccggtctctcctcacaatcgttcggtcacgtccttccatgagattctcgacatgatcgattactacggcgagcaccgcggtgatatcgaacatgcgcttgacggcatcgtcgtcaaggtcgatgaccttggcctgcaacgcacccttggcgccacttcgcgggcgccgcgttgggccatcgcctataagtacccgccggaagaggtcaatactgagctgctcaacatcaccgtgcaggtggggcgtactggtcgtgtgacgccggttgcggtgttgaaaccggtgtatgtggccggttccactgtggctcgcaccacgttgcacaatggtttcgaggtcaagcgcaagggcattctcattggtgacacggtcgtggtgcgcaaggccggtgatgtgattcccgaactggtagggccggtgctggagcgtcgcaaggggcgtgagagcgaactgagagaattcgttatgcccgagttctgcccgtcatgcggcgcgaaactggctcccgccaaggagggcgataaggatattcgctgcccgaacgtggaaagctgcccagcgcagctcaccgagcgtgtgatctcgctggcctcgcgcaaggccttcgatatcgagcatctgggcgagcagtcggccatcgcgctgaccaacccggaggagaaccgtcccgattctgtggcgacctatgcgccgaatatcacggagattctggtagctcccggtgaggaaccggacccttacgagccggctccgggattggcattgccggcagtgcagcggccggtgctttcgaacgaatccggactgttcgccttgactgccgtcgatttgcgtgacgtgcaggtgtggcgtgaggctgcgattgtcgaagtgcatgaagtggtcgatgccaacggcaagaagaagaaagtgcgcaagcgcgtgggtggctctggcctgtggcatcaggtgcccgctttctggacggctcctacggcggccaagagacttaccgccaagcagttggctgagcgtgcgcaggtggcgactgctacggctgctgccgcggagggaatcgaaccggctgtagtgcagtcggcacgggggagtgcatcggacatcatgcccggctcatctggcgaagccgcggttttgtctgatgcgaagccggcctttgtcgcatcgcgctacccggaatatgacgtgccggctgatgcggttatcgttcgcgtcgaccacaaaaccacgcgcacgggcgtcactgatgtgccggtgtatatcaggcccggcgagaatacgcgcaagatgttcgacgagatggacaaagcccgtcacgcggacttgtggcgtgtgctggtggcattgtccattcgacggctcgggcctcccaccgcgcgtctgattgcctccgctatgggttcgttgggtgccattgaaaacgccacggtcgaggatttgaccgccatcgatggcgtcggtccggaaatcgccgaatcggtggtgaactggttcgccgcggcccgtgaacccggagactggcgtggcgagacgttgcgtgcgtggcaggccgccggcgtgggcgttgacgtagcggagaccagtacgctgccgcaaaccttggcaggtaaaaccgtggtggtcaccggttccttggaaggctattctcgcgactccgccaaggaggcaatcattgagcgtggcggtaaggcagccggttcggtgagcaagaagacggattacgtggtggtcggcgaaaacgccggctccaaggctgccaaggctgaggaactcggcatccccatgctcaatgaggctcaattcgcccaactcctcgaaaacggtagcatctgatttcttggctcccttctctgaggctggactgtttgtagatgaagagcgaacgacagcgagccagaggatgcgaacgaagtttgttcataattgcggatgagctgtcgcatcagacgactgaggagagtaaccattgcgagccaaggagtgaattctcaacgcagtcctgccccagtgtgacttactccactctctctggcatgccgccgcaacacacgctagggtagtacaggttcttaaggaggatacggatttatgagcgacgcacgtcagatcgaagccgagatctatgaacgcctgagcaaggtcatcgaccctgagcttggccgttcggtcaccgacctcggcatgattgccgccatcgaggccacgcctgctgatgccaacgttgacactgatgcctatgacgtcaccgtgcatgtcgaactgaccgttcctggctgtccgctgagcgaaaccattaccaaccagatcaacggtgcagtgagctcctatcctggtgcacagctcaacacccatatcgaagtcggttcgatgagccgcgataagctggctgaccttgttgctgatctcaaggccgaacgtaaacagaacccgttcagcaagcccggagtcaagacccgaatcttcgccatcgcctccggcaaaggcggcgttggcaagtcctcggtcacggcgaacctcgccgccacttttgcggcacttggctatgacacggccgccattgacgcggatatctatggattctctctgccgcgtctgttcggcgtgcacacccagcccaccaacctgaacggcatgcttatgccggtcaccgcatggggtgtaaagctgatttccatcggcatgttcgccggtgccgatcgcgcgattctctggcgtggtccccgtctgcagcgatctttggaacagttcctctccgatgtatggtggggcgagcccgacgtgcttttgcttgatctggctcccggcaccggcgacatggccatctcggtggctcaggcgttgcccaacgccgaactcgtggtggtcaccaccccgcagccctccgcctccgacatcgccgtgcgctccgggctggtcgcattgcaggtgcccatgaaggtgcgcggcgtggtggagaacatgagctactacgagcataaaggtgagaagctggagattttcggcgcaggcggcggccagcgcgtggccgagcagctgactgaggccttgggctatgacgtgccgctgatggcccagctccctctggaacccgaggtgcgcgagaccggtgaggccggacgcccggcggtcctgacctccgagggcgctctgcgcactgatggcatcggccagaccttccggggccttgccgagcgccttatggcgctctgagttgcgcaacgaatgattctcgataagaaaagtgtgagcctcacatacttgtaatcgcacattgagttgtacgaatcatctattggtggatttcagacatcgtcgatgtcaggtgacatacattccgatgaatttcctgcgcaacaatttctcgaaataatccttgttttcgagaaatctttgcactgacgctgcctgagcgcaaagatttctcgaacaaaaccgccatttcgagatttttttgcactgacagacgcttagcacaagaaattctcgagcaatgggctttttcgagaaattcttgcgcttatgtccaattacgtcagaggaatgcttgttatcctcatgtgcgtttgggtgataatgtgcatttggctcacacttttcccgcagcgaaccattttgtgtgagtgcatacgggaagacccccgaccgcagaagcggttgggggtcttcttgatgagtagtagaactcagatgtggaagtagagctcgtactcgagcggggtcggagccaggcgagcctggtcgatctcgtcgcgcttgaggccaatccaggtctcgatcaggtcgtcggtgaacacgtcgccggcagtcaggaagtcgtggtcctcttccagggcgtccatagcctcggccagggagctcggcacctgcttgatgccagcgtgctcttccggcggcagctcgtagaggtccttgtcgaccggctccggaggctcgatgtggttcaggatgccgtccaggccagccatcagctgagcggagaaggccaggaacgggttgcaggatgggtccggagcgcggaactcaatacgcttggcagccggggaggtgccagccagcggaatacggatggcggcagaacggttacgagcggagtacaccaggttgaccggagcctcgaagcccggaaccagacggtggtaggagttcagggacgggttggtgaaggccagcacggaggaggagtgcttgatcagaccaccgatgtaccagcgagccaggtcggacaggccagcgtagcccttctcgtcgtagaacagcggcttgccgtccttccacagggactggtggcagtgcataccagtgccgttgtcgtcggcaatcggcttcggcatgaaggttgcagccttgccagccagagcagcggtctcgtggacaacgtacttgtacttcatcaggtcatcgcctgcgtgctgcagggtgttgaagcgatagttgatctcctgctgaccagcagcggccacctcgtggtgggaacgctcgaggatcagaccgaccttctgcaggttggcgaccatgtcgtcgcgcaggtcctgggtgtggtcgatcggaggaaccgggaagtaacccttcttgacacggttcttgaaagcgatgttcggggtgccgtcctcttcggtgtcaacgccggagttccacggagcctcgatggagtcaacctcgtagaaggaacgctgcatggagttctcgaagcgaaccttgtcgaagatgaagaactcggcctcaggggcgaaggaagcggtgtcggcgatgccggtggacttcaggtaagcctcggccttgccggcgacctgacgaggatcgcgggagtacggctcgtcggtcagcgggtcgacgatggagaaggccacgtcgagggtcttgtgcttgcggaacgggtcaacgaaagcggtctcaacatccgggaccagcttcatgtcggattcgttgatggcctggaagccctgaacggaggaaccatcgaacggcatgccgtcggtgaaggcgtccttcaggaattcgctagccggcacagtgaagtgctgctgaacgccgataagatcggtgaaacggacggagacatactcgatgccttccttgttgataagggcctcggcgtcttccttggacttgagttcggtcacgggaccgctcctttcatgtggaatataacggtatccatcgtaaaatcgcgcgtttcgccggctcgaaacttgggttacgagaatgtttcgtgactatggacagcagccggcaaagcgcggtattccaaggaaacgtcattacggaaaggaaacgtgaccaatcgggtgaatgaatacggacgtccgcaacgtggacagtgggtattgacagatggagatgatgcttatagggacgaatataagagaatccccgccaacccaggaaagtcagcggggattcgttacggaatatgcggcagtctatcagcggccacgcattgcgcggcgggagatcttctgcgggcggttcggatccatgcccttggggatggaatagcccttcttggactgcagcgtgtgcaggcgctcgttcagcgttgtcgtctcggccctggtcagcaggaagcggcggcgcgggtgaatcttggctaccagcgcgttcttgtgattggtgggctcgtagctcttggctttggtcaccgtgctgcgcagcttgtccagcggaacctgcttggggccgtgtcccacggcaatgcggtacacgggaatggtggaaccagcggtgactcccctgatttcatgctcctggcggtccatggccttcatcacgcggccgtactcgccttcgccgatgaggtagatgccgttcatcgaagtaccgcgccagatggcgtccttggtcttcgggtcgatccacaccggcttctgcgggaagtcgaaaccggctttctgcatgttgctcagcacgccgattgcggcgccgggcttgccgtcgatctgcttgtagccgaccttgtctgcacggcgggtgagtagcatcgtggccagcaggatgccgagcatcacggcggtgatcatggtgaaaatccaggtcagccaggtccacttggcaatcaggccgataatgaccatgacgaccacgggcagcaggaaagcaccggcctcgagccacggcagggccttgtcttccttggccgtgtacttgtaaatctggatgatctgcttgattgtgctctgcttcttgggcttagcgtccttttccgccatcacttcttccttttgctgggacgaaacacactggacaatatcttatcaggtgcgctggtctggctcagcgcgtgtgcagcggccggtcgtcggccttcagcaacgtctcgccgagcgtttcgctgaatgtggggtgaggatggatgagccgggccgcgtcagccagcggcaatcggttaccaaccaattgctcggcttcggagatgatgtcggaggccacgggagaaaccatgtgcacgccaagtacccgtggagtgtcagggtcggcagcatcgcagccggagacgatagtcagtgaaccggctgtgccgctcatcaacatgcgggcattcgccagcattgggtagatagtctccttgacctcgaggagattctcacgtgcctgcgcctgctcgatcgtcagccccaccgatgccgcctcgggtgaggagaacacgatttgcggaacggtgttctcgtcaaccggcttgggattgagacccgcgatggtttcggcgatgacgatgccctgttcgaatgcgcggtgagccagtgcatggcccggcgtcacatctcctaccgcccatatgcccgatttgttggtgcggccaaacgcatctgtggcaacatggccgctctccgtaagtgcgacgccccatgatgggtcagcaactggtgtacgtccaatggccgccagtgcaatctcgccccatacggattgttcgctatcctgcccttcatgtgtgtaatgcacggtggcacccagattagcgccggtatccacatgggtgacgatggtatgagtgatgacgttcacgccgcgacgcttgagctctcgggtcaacgttgtgccggcgcgacgatcccacgtggagagtacgcgattcttgcgaatcaacaacgttacctgtgaaccggccgcgttccacatcgaggcaaattcgagagcgatcgctccagcgccgataatcacagcggatgaggggaactcgttgacttccaatgcctgcgtggaatcgatgagcgcgccggcgaacggattgccgggcagcggacgaggcttggcgccggtggctatgacaacgttgccggccgccagatcgagactagcgccggtcggctcggggacgtccgccttgtgataagtgagaatctcggtttgcccaggggaaggggcgagatgaacaatatgccgggcgttgtctgctgcatcggtttcttccgcattgaaggatgcgtcggcgcgcagcacagtgatattacggtgcgctaacagccccgccaaacctttgaccatggtgtccaccacgcgcagccgataatcgcgcaaagtgccgaagtctatgccgttcaccgaggcgttgacgccgagttcggccgcccgatggacggtgtcgatggtgtgcgtggcggtaatcagtgccttggaaggaatgcagccgcggctcagacaggtgccgcccacggtggcgtcgcgctcgataagggccacactcatgccaagctcagctgcgcgcaatgcggtggaatagccgccggggccggcaccgatgattgccaaatcgaattgttcgttcatattgacctcctcggcagtatgtttcgcaaaccagtatggctcccatcataggaagccatactggtttgcgctgtcagtattgcataaaaaaaaatggcttcctcgcaaggaagccagaagatgagtatcagtccgcaggccagtgaccgcgtttcgggtaacgcggcttggggagcctccagcggcgcatctgaatggcacggctccacgcgtaggaaaaggagcgagatcccttcgacacagacgactcgccatacttggcaatgagcttggccttaagcttgcgccacatcagccacacgtcgatgattacggcaatcaggtagccatacatgcacagcatcatgatgatggatacccactggttctgcacgagagacgtgacaagcatggacgcaatcaggatcgcaaatgccacgggaataaaccattcgccaaggttaaaacgggcgtccacgtaatcacggatgtaaatgcgccaaggcaaccgttcggccttgggcatgtgattgatgtcgcccttctgcattgcctcgtattcggcgttttccttctcgcgtagacgagccttggcggcttttgcgctggctttgcggtccaccggaaccagcggacggatgccggcggcctgagcctgcttcatctttggagtgggacggcctttcttctcgttgggtgcggccttcttcgcggcttcctcaacgggaacctgagcctcttcttgtttcttgaacggattccatgtcatgctttgaggttacggtgacgttcagacacccgaccataggcgtagccattgcaataacgccactcacaacatatatagaggagaactaccatggccgcattaactgccaacgagattcgttctcgtgtggaatccgactggaatcgcatcgtcaaggtgttgagcgagaaagtggcgctgcagtcgatttccgccaacggcattaccgccgagcacatgaggcgttccgcgcaattcgtggccgatgaactacgactggtcggtgtggatgccaaggtggtgcaagcctccaatgcggacggtactccaggcgcgtgggaagtcatcggctcacacatcgtgaacccggatgcgcccaccgtgctgctgtacgcacaccatgacgtgcagcccgtgccggatccggccgaatggaacaccgacccgttcgtggccactgagatcgatggccgcctctatggccgtggttccgccgatgatggcggcggcattgccatccattccggcgcgctgaaggccctcggcaatgacctcaaggtcaatatcaaggtgttcatcgaaggcgaagaggagatgggctcgccgagcttcatcccgttcatcgaagcccacaaggacgagtttgccgccgacgtcatcatcgtggccgattccggcaactggtcggccgatattccctccctgaccacctctcttcgcggcaatacctgcgtggatgtgaccgtcaagggtcttgaacatccagtgcactccggccaatatggtggcccgatcttcgattccaatacgctggccgccctgcttatcgcctccatgtatgacgagaacggcgatctggctgtgcccggcgtggctgccgaagagccgatcggcggcctgcagcgcgacctcgacgagaccaccgtacgcgaggattccggtgtggtttccagctacgagttcgccggcaccggttccctggcttcccgcctgtggaccaagccgtccgtgaccgtgatcggcttcgacgcgcacccggtcgaaggctccttcaatgtgatttccccggagactcgtttccgtctgtctctgcgtaccgcgcccacccagcgccctgaagaagcacaggaagccttggccgcgttccttgaatcccacgcgccgttcggtgccaaggtcactgtcgagcgtggcgaaaacggcatgggttgggccatggatccgaccgccatcgccaccaaggatgcgctggaagccatgaccgaggcgttcggtgtggaacccattaacaagggtgagggcggctccatcccgttcattcccgaactgcagcgtatcttcccgtctgctcaggtgttggtcactggccccgaagacccgaaggccaacgcacacagccccaacgagtccatctccttgccgggcttgaagaacaacgtgattaccgaggccctgctgctcgataagctcggtaagtagttttgtactttgaaccttggctcatcactccacagcggcgctgatttgccaaagagcggcatcgtgtcttcactgagagcctcgccacattgcttaccgaatctattgcctttgacggtggtttgctttatagtcggggagttgacacgggagctgccgacaggcggctgagaggagacgcatagtctcgaccgatggaacgtgaccggataatgctggcgcacggaattgtcgctcttatttacccgtgcctgaaccaatcgtgcaagctgctgtggtttgcgtgagaagagaagaaaggcacatcatggctgaagctgtggccaaggctaattacaagtggcgcgttgtcgatatcgtcgtcgccgctattctcgccgttgcatccggcgtcatcttctggggctgggacatcgtttgcaccgctccgctgactttgttcgaaggcgtgacccccggttttgaaggtctgctcaatggattctggctgttcgccggcccgcttgccgccatcatcgtgcgtaagcccggcgccgccctgttcgccgaaactctcgccgctttccttgagctcacgctgggcaaccagtggggcgtcggcggctcgctgatcgtcggcatcatccagggtctgggcgccgagatcggcttcgccgttttcgcttggaagaagtggaacctcggcaccaccatcctttccggtgcgcttgccggcgttggctgctgggcctactactgggccaccaacccgggctggaacgccatgcgtgtcacctggtacctggtgggttccatcatctccggcatcgtgattgccggcgtggtggtctggtacctgtcccgtgcgctcgccgccaccggtgcgcttgagcgttttgaatccggacgtagcaaggcacgcgtctgatgcaggtcgatccggctgcggtagaggctagcggctggggctggcggcacgccacgcgcaaggatttcgcgttgcgtgccgtcgatttcaccatccggccaggtgaacgtgtgctcttgctcggcgcttcaggcgcgggcaaaagcacgatgatggccggtctcgcgggtgtgctgggcggcgatgaggaaggcgagcaggaaggctcgctcaccatcgacggtgttgacgcgcgcgaggcgcgaggccgcgtgggactggtacttcaggacccggactcgcagatcattcttgaacgactgggcgatgacgcggcgttcggctgcgaaaacctcaacgtgccacgtgaggaaatctggcagcgtgtgcgcgaatcgctggatatggtcggtctcggagggctcgaactgggccgctccacccgtcatttgtccggcggacaacggcagcgactcgctctggccggcgtactggccatgaagcccggcctgttgttgctggacgaaccgaccgccaacctcgatcccgaaggcgtgatcgaagtgcatgatgcggtcaaaaaggtcatcgagaccaccggccagaccatggtggtggtcgaacaccatatcgacgtatggctggatttggtggaccgcgtgatcgtgctcggtcgacccgatgccgattctccggctggagcggttatcgcggacggcaagcccgatgaggtatttgcgcagatgggcgacgttctggccgccggcggcgcgtgggtgccgggacgtgcgattcccgattatcgtcccgacgatgaaacccgtggggaaacggtgctcagtaccgagaacctcagctttggacgcggcacggcgctgggtaccggcatcaatttggatttccacgccggcgaagtcacggcactgatggggccgaatggtgcgggcaaatcaaccatggcgttgaccttggcgggtctgctgaagccgattgatggcaaagtgctgattgcggatagtttgaaaccgccgcacgcaggtcaagaacccatcaactggaaaagcaaggaactgctggggcgtatcggcatggtgttccaggagcccgaacatcaattcgcgtctaacttcgtgcgcgacgaggtggccatcggacccaaatcgatgggacacggtgaagacgaggcttaccagaccgcgaatcgtatgctcgagcagatgaacctcacccgcttcgccaaagcgaacccctacaccttgtccggcggagaaaagaggcgtctgtctgtggcatccatgttggccgccgctcccaaggtactggtgatggatgagccgacattcgggcaggacttcagcacctggaccgaaatggtgaagctgattgcctcgattcgcgatcagggatcatgcgtgatcatggtgacgcacgatgaggcgctggttgacgcgctgggcgcgcgacgggtgatgttcgaggagacacgggcatgagcgacatgattcgattcgttactgatgatgccggtgccggagcctctgaggatacgatgtccgagaacgccgcggcaaagccggcaagtgcggtggccgctgtcgcaataagcgatgtggtgatggtcagtccgcaggagacgcgcgtggaacccgtcagggcgtcctcaccctcctggttcgtggcacgtatcaacgccgtcagccgcatcatcggtgcactgctgctgtgcattccgatgttcatcagtctggacgtggtgtccgcatcggtggcgctgggcatcgaattcgcgctgctgtggattggcggcgtggcaccttggaccgtatgccgcaaaacctggccggtatgggttgccgcagcgggcagcttcatttccgtgttcctctatggacgtacttcaggcgagattctgtggcaaagcggctggatcgtcatcagtgaaggatccatatatctcgccatcgctactgccatcagggtggcggcgatcgccgtaccgggcgtgattctggcgttgggacttgaccccaccgatctggctgacggactggtggagattctgcatttctcgccgcgattcgtatatggaggtctggccggactgcgcatgttcaccctgctgcaggaggactggcgagcactcggtctgtcccagcgctcgcgcggcctcggtgacggtaacgccatagcgcgtgcgctttcccaggcattcggcctgctggtgctctccattcgccgtgccaccaagcttgccaccgctatggaagcacgcggcttcggctccaatgccccgcgctcgcaagcgcgcatcgcccgcttgaagcccatcgactggctcttctacgccatctgcctagccgtcccgttggtctccctaggcgttgccattggtaccgggaattggcacttcgcttttcagggtgtctgaaagacaacgtaatgacccggcagtagggtagtgaccatgcccatcacgcctaagattcttgataatccgaagtccgaccgtgtgcgccgtatcaccgatttggcccgcgccaaaggccgggaacgttcgggccgctttcttatcgaaggccctcagtccgtacgtgaagccgtcacatggcggcccgacgtagtgcaggatttgtatgtggaagtcgcacaagcgctggatcatccgcgcatcgtttcctccacgctggagagaatcgtcgaagcgtcacaggatgccaccatttatgttcatcagtgcactggcgatgtgattcgtcgtatcagtgcggatgcccaaggcattctggcggtgggcaatgcgcaggccatgcagtcggacgtcgatgacctcgccttggataccgcagattatgctccgcggattgccgcattctggcaggtgcgtgatccgggcaatgcgggtacggtgattcgcgcggctgatgccgcaggctgcgatgccgtcatattcgtggatgattgcgtggatgtgctcaatcccaaggttatccgctccactgcgggatccttgttccacctaccggtgttcaccatgcgtacgaatgaattctttgattggacttccgaccatcatgtggacgtgtgggccgctgacgtatacggtaccgagaaacgcaagccggaaagcctgcccgcggtattggcggacaaggcagcggtaagcatgtctcaggctgtgctgttcggcaatgaggcgcgtggattggagccggagatccttgaacgatgtggccgcatcgtctccattccgctctatggaaaagccgaatcgctgaaccttggtacttcggccgcggtgatgctgatgtcgctggctatgtcgggtcatattgaaagaatgtgaaatcggtaaaaaacgctagaaatgctgagaaatcatcagatgaaagggttctcgtggcagaacaaatggtgttcgacgccgaccaggtgaccgcagcggtcgccgagggcatcgagaagatccagcacgcctccaacctggaggaactcaaggccatcaaaacacagtacgcaggcgccgattcggcgatgacccaggccagcaaggccatcggttccctgccggccgatcagaagaaggaagccggcaagctgatgggcaagctacgcgccgatttcggacgcgcctttggccccaaggagaaggaactcaaggaagctgccgaacaggccgcccttgccgccgaaaccgtggacatgacgttgcctgtgaaccgcaagcctttgggcgcccgtcatccgctggccaagctgatggaggacgtcgaggacttcttcatctccatgggctggcagatttcctccggcccggaaatcgaagcggaatggtacaacttcgattccctgaacttcggcccggatcacccggcccgccagatgcaagacacgttctacgtcaagggcaaccaggccaaggacgctgccggcttcgtcggctccaacatggtggtgcgtacccagacttcctccgatcaggttcgcgccctgctgacccgcggcgtgcctctgtacatcgccagcccgggccgcgtgttccgtaccgatgagctggacgccacccacactccggtgttccaccagtgcgaggccctcgccgtcgacaagcacctgaccatggctgacctgaaaggcgtgctggacaagctcgccgtcgccatgttcggtcccgaggccaagacccgactgcgtccgagctacttcccgttcaccgagccgagcgccgagctcgacctgtggttccccgataagaagggcggccccggctggctcgaatggggtggctgcggcatggtgaatccgaacgtgctgaagtccgcgggcatcgacccggaggtctacaccggcttcgcgttcggcgtgggcatggagcgtacgcttctgctgcgcagcgacatcaacgatatgcatgatttggttgaaggcgacgtgcgtttcgccgaacagtttgtgatgggggagtgaattacccatgcctatgatcgacatcgattggctcaaggaccacgtcgaggtccccgaaggcctgacctatgaacagcttgccaaggacctcgtcaaggtgggccttgaagaagaggagattcactcctcccaggtgaccggcccgatcgtggtcggctatgtggtggacgccactcccgaaccgcagaagaacggcaaggtcatcaactggtgccacgtggactgcggcgacgaatggaacgagaccgacgagaacggcaacaaggtgccgcgcggcatcatctgcggcgcacccaatatgaaggccggcgagaaggtcgtcgtcaccctgcctggcgccgtgctgcccggcgacttcaagattgagccgcgcaagacctacggccatatctctaacggcatgtgcgcatccgagcgtgaactgggtcttggcgacaaccacaacggcatcatcctgctacgtgagtacggcttctctgaggccgaatacgaagctctgaaacccggccaggacgccatgcacctgctacatctcgaccagccgctgctcgagatcaacatcaccccggaccgtggctacacgctgtcttaccgtggcgttgcccgcgagtaccatcactccaccggtgccgtctacaccgatccggccatcgcgctgaacgagaaggctccggagcctgctgattaccagcccggcactccggtggacatcgacattgagattgatgacaacaacccgattcatggcgttcctggttgcgatcgttactacgctcgcgtcgtcaagggcttcgaccccaacgcccacacgcccagctggatgcgtcgccgcctgattcgtgctggcatgcgctccatctcgctggccgtggacgtgaccaactacgtgatgctcgatctcggtcagccgatgcacgcctacgacctcgataagctcgagggcccaatcgttgtgcgtcgtgccaacgagggtgagaagctcaccacgctggacggcaaggaacatgacctgagcactgaagatttgctcatcactgattcgccgaatggcgaacgcggctcgcgtatcctcggccttgccggtgtgatgggtggactgtacggcgaggtgaccgccgacactaagaacatcctgctggaggccgcgcacttcgatcaggtgaccatcgcccgttccgctcgtcgccacaagattccgtctgaagcatcccgtcgtttcgagcgtggcgtcgacaccgagctgcagcctgctgcggctcagatggccgccgagctcatggccaagtacggtaacggcgagcccagcgagcatccgaacgatgtggataacacgccgcgtccgaaagtcattcacttcaaggcttccgaagtggcccgtgtggccggtctcgatgtggacatcaaccgcatctccgacattctcaccgacatcggctgcgttgtggccggcggcggcaacggcgaattctccatcaccgcgccgagctggcgtccagatctgggtgaaccgtgtgatctggtcgaggaaatcgcccgactggtcggctacgaccagattccggtcaccgtgccgcctgcaccggtcgagggccttgtgggcctgaccccggatcagactcgccgccgtcgcgtggcggacgagctggccgaatacggcatggtcgaggcgctgagctacccgttcgtcggtgacgacgattaccgcgctttcggcttcgaccctgaagccaccaagaaggtcagcgtcgagatcgccaacccgctctacggcgatcgcccgtacctgcgtcgtgacattctgccgaccttggccaccaccgtgcagcgcaatattcgccgaggcattgaaaacgtgtccctgtatgaactcggccatgtctatctgtgggatccgaacgcgcccgcaatcccggctctgcccggtggcgtgcgcccgaccgatgagcagctggcagcgctggacgccggtctgccggatcagcccgaccacgtggccggcatcctgaccggtctggctgaagacgatggctggctgggcggcaagcgtccggtcgattggtcggacgccgttgaagccgtgcatcgtcttgcggatcgcatcggtgcgaagatcgtgcttgatcagcctgcggccgaagatgtgcctgcacagtggcatccgggccgtgctgcccgcgtcatggtgggcgacgtgttcaccggttgggtcggcgaactgcatccgcgcgtcaacgaggcacttggcttcccggcgcattccgcggcgtttgagctgaaccttaccgcgctgttcggcaccctgaccggcaagccggtgcaggccaagccgatttccagcttcccgccagtcaagcaggatttggcctttaccgtggatgcgtcggtgactgccgatcagctggaagcagtgattcgtgaggcggctggtgccaacctcgagtccatcgaattgttcgacgtgtttaccggcgagcaggtgggtgagggcaagaagtccctggcctacgctgtggtgttccgttctccggacaagaccttgtccgccgatgacagcgacgccattcgccaggctatcgtggccaaggctgccgatcttggcgcccagctgcgtgcctgatcactgtacgaaagcatgaggagcgccatgagtgaaccggaacataacacaccggaatacgggcaataccagaagcccgcatatggtgcgatgtcgggccaatacgggccaaactacaacccgtacatttatggcgctcccgaacccgatgccaataacggctccgctgctgataacaacggagtcggagccgggcagccgaacaatggacggcccgcttcttccggcaattcgttcggcggcaatcagcagtacgggcagccccagcaggacaatccgtttggaccccagtacgggccgggctcccggtttggcagcaaccagccgaatggccagtcccagcagcctcactactacaacggtatcgatctcaatgaccccaatcagaatccgctgtacgggcattgggattcctatgcaatcatttccttcgtgctcgccatgttctttcccgtaccggtgctctccgctctgatgggcggcgtggcgatgtggcggacgcgcacgttccatatgaagggctttggcctggctcttgcagccgtggtcatcaacgtgttctacacccttgcggttatttggatggcattgaatggctatgatgccatgactctgtatcaggacatccttcagcagttcaccggcagcggcactggtccctcatctgattccatctctgcatagggctgagttgctgcaacacacccactgtataactatgcaatagtctgcataatcgcgtatactcatgcgaagtacgtcagcggaaaagagatgagtatgacgaaatatacagtggccgtagccggtgctacaggctatgccggcggcgaggcgctgcgcattcttgcggcacaccccgactttgcaatcacatgtgtggcaggccattcctccgtgggggaatcgatggccaagcatatgccgcatattccgcaactggccaatcttgttgttgaagacaccacgcctgaggtgctcaacggtcacgatgtcattatccttgccttgcctcatggcgcttccggcaagctcgcatcccagctcgacccggatgccgtggtcgtggatctcggtgccgatcatcgtctcgaagaacaggccgcatgggatgaattctatggcggcgatttctacgagcactggacttacggcatgcctgagctcatcaccggcaagactgccgatggcgcatacacccgtcaacgtgaggcgctgcctggtgccaagcgaattgcgggccctggctgcaatgtgactgccacgactctggctctgcaacccggcatagcggaagggttggtcgagccgaaggacatcgtggctaatttggtcgtcggctactccggcgcaggcaagaacctcaaacgcaccaacctgttggccgccgaggcattgcaatccgcgctgccgtactcggtgggcggcacgcaccgtcatattcctgaaatcctgcagaatttcgcccatgcggccggtgagaccgcagctgatgccggcaagttcacgcttggcttcaccccgatactggcgcccatgtcccgaggcattctcgccaccgtgtcggctcgcatgaccgacaaggccaaggcgatgagtgacgaagcaatccgagacgtatgggcaaaagcctacgaaggccaggacttcatggtgctgctgcctgagggcgcattgcccgccaccggcaacatcatcggttccaacgccgctcacctgcaggttgtcaccgaccgcaagtccgggcgcatttatgccttcgccgccatcgacaacctcaaccgtggtaccgccggacaagcggtccaatcattgaatatcgcacttggcctgccggaagatgcaggcctgaccaagatcggagtagcaccgtgagcgtcacattcgcgcaaggattctccgctgccggcgtggtggcgggcatttcatcggttgaaggcaagaaggatctcgctctcgtggtcaacaacggcccgcttgacgcggtggccggcgtgttcacgtcgaaccgattctgtgcagcccctgtgcagtggagccgcaaagccgtggcggacggccacgccaaagccgtgattctcaactccggcggtgccaacgcctgcaccggtgaggcgggatatcaacagtccgtgttcaccgccgaggcggtcgccgaactcgtcggcgcacaagcagaggatgttgctgtgtgctccactggtctgatcggcgagctgttgcccttggataacgttttggccggtgccaaagccgcttatgctgctcttgccagcaccgccgaggccggggcggacgcctcacatgccattatgaccaccgacaccaaggccaagaccgtcgaactgaccggttccaacggctggaagatcggcggcatggtcaaggggtcgggcatgatcgccccgcagctggccaccatgctgtgcgttatcactaccgatgccgtggtcagtgccggtcaaatgcaggccgcgcttaccgtggccgccgagcattcgttcaaccgaatcgacgtggatggctgcatgtccaccaatgacacagtgctgctgctcgcctccggagcctccggcgtggagcccgacaaggacgagttcaacaagctcgtgcgcgaggcctgcgcctccctgtcccgtcagattatcggcgacggtgaaggcgcttcccatgacattcgcatcaccgttaccggtgccaccagcgaagacgcggcccttgcctgcggccgtgcggtcgcggcctcgaatctgctgaaatgcgcgatctccggcaatgacccgaactggggccgtatcgtcagctccctaggcaccgtttcccctgaagttgcaccttatgattccgagaaggtgaccgtcgacgtcaacggcgtgcgcatctgcgagaacggtggtgccggacgggaccgtagcgaagtcgacatgaccccgcgcgaagtccacattgacatcgacctcaacaccggatcgaacgccgaggccaccgtctggaccgacgatctgacccacgaatacgtccacatcaacgccgactacgaaagctgacatccaccatgctctcgctggcggatgtcgccgtgaagcaaatgccgagaggcgtttgtaggcgacgtgttcgccgacaggcgaaccgacaaaacgtaggcaacgcctactgtaattgcaggacgctgtccggtggaaccggactgagggtggtctcgccaaaccacccccagccatgcgcagcatgacagccccgtcagcggggggcaaagttacggaaagaagaacatggctactgaattgaagggacctggattccatttcgacgtgcataccgatttgcgcgccgatcagaaggcggaagtgctgattgaggcgctgccgtggctggaggaattcgccggccagcgcatcgtggtcaagtatggcggcaatgccatgatcgacgatcacttgaagcagtgcttcgccgaggatatggtgttcctgcgccaggtcggtttgcatccgattgtcgtgcatggcggcggcccgcagatctcgcacatgctcaaggccctcggcatcaagtcggaattcaagggaggcctacgcgtcaccacgccggaagcgatggacgtggtgcgtatggtgctgaccggcaaggtctcgcgcgaactggtcggcatgatcaatgcgcacggcccgatggcggtcggtctgtccggtgaggatggaggcttgttctccgccatgcaacgcaagcccattatcaatggcaagcccacggatgtcggtctggtcggcgatgtggtgtccgtcgatgcctccgcggtcgaggatttggtcgcggccggtcgtattccggttgtttcctctgtggctccgaatgaggaggacgccaccgaggtactgaatgtgaacgccgattccgcggccgcggcccttgccgcagccgtgggcgcgcacaagctggtcattctgaccgacgtggacggtctctatgccgactggccggataagaattcacttatcgggcgtatcggcgtggaggatctgcgcgacatgctgcccgatctggaatccggcatgcgccccaagatggaagcatgcgtgcgcgccatcgatggtggcgtgccccaagcccacatcatcgacggtcgtaaaccacattcgatcctgaacgagatattcacctccgccggtatcggcaccatggtcgtgcccgaaggcggtatggaaatgaggagttcctatgagcactgagcagaacgagacgctgggcgctgaagacagcaagtggctgggggagtactcccaggtacacatgaacgtgttcggcacgccgctgcgtgttatggatcacggtcagggcgcgcatatttgggacgttgatggcaacgaataccttgacttcctggctggcatcgccgtcaattcgctgggctatgcccatcccaagtgggtgaaagccgtgtctgagcaggcggccaaggtggctcacatcagcaattatttcgcttccgagccgcagatcgagctcgccgcgaagctggtcaaactggccggtgccccggaaggttccaaggtctacttcggcaattctggtgccgagggtaatgaagcggcattgaagctggccaagctgtatggtcgcaccctgcccggcgcactgccgtccatcggcggtaagcccgcccgtattcttgccatgacgcacggcttccatggccgtacgatgggtgcgctctccgcaacttggaagccgaacatccgcaagccctacgacccgttggtgcccgacatcgaattcgtgcgcgccggcgacgaggtcgccctgtacgaggcgttctcccagaccggtcttggccactatggcaaggggccggtagcggcggtgattctggaactcattcagggtgaggccggcgtgcagccgttgggtgccgattacgtcaagttcgtgcgtgagctgtgtgacatcaaccatgcgctgctcatcatcgatgaggtgcagaccggcatcggtcgtaccggcaagtggtttgcatttcagcgtgaggatctttccggcggcgtgaccccggatatggtgacctttgccaagggagtggccggcggattcccgatgggtggcatgattgccttcggcgagaagcttgcagccctgttcactccgggctctcatggatcaacctttgccggcaacccgttgggtgcggcggctggacttgccacactcggtgtcattgaggacgataacctcattgccaatgccgaggcccgcggccagcagctgcgcgatggcattatggtcaccggcaatccgctctacgtatccgtgcgcggtcgtggcctgctcgatgccgtagagctcaagcatccctgcgcccacgccgtcatgaactactgcctcgaacacgggctcatcgtcaatgcggtggcccccaatgcgctgcgtttcgcaccgccgctgatcgtaaccgccgaagacgttgaccaggcgctcgccgttctcaaggacgtgcccgctgatctgccgaacgactgacttacctgacctatataaggagatcaccatgaccccagaactgcgccatatgctgcgtgatgacgacctcaaccatgaggagcagaagcaggtgcttgagcttgccatcaagttcagcaagaaccgtttctacaagcagccgtttgccggtccgcaggccgtcgccgtgctgttcgacaagccttccacccgtacccgctccagtttctccattggtgttgccgagcttggcggctacccgctggtcattgacaagtccggctcccagctgggccgtggcgagcctgtggccgataccgcccgtgtgctcgaccgtatggcctatggcgtggtctggcgcacctttggtcaggatcgcgtggaggaaatggccaagtattccacccacccggtggtcaacgcgctgaccgatgacttccacccctgccagattcttgccgacttccagaccatcgccgaacaccgcggcggcgtggacaatctgaagaaccagaccatcgcctacctcggtgatgccgccaacaacatgtccaactcgtatctgctcggcggtgccgttgccggtatgaacgtgcgtgtggccggacctcagggctacctgccgcgtccggatatcgtggccgatgccgaacgcattgccgctgagaacggcggttccattctggtgaccactgatgctcgtgaggccgtcgccggtgccgattgcgtgtttactgacacctgggtttcgatgggtgaggaagctgaatacgccatccgatccaagccgttctgggattatcaggtcaatgccgagctcatggctctggctaagccggatgcgctattccagcactgcctgcccgcctatcgcggtaaggaagtcactgccgaggtgattgatggcccgcagtccgtggtgtgggatgaagcggagaaccgtctgcacgcgcagaaggcgttgctcacctggctgaccggcaaggcccgtggcgacgaaagcctgctcgcatgagtgaagccctgccgtccctgcagcgccctgccaccagggccgcgcgactcagtgccattgaacaggcgctggccacgcatgtcatcacgtcacaatcgcagctgtcgaaaatcctattggacgaaggcatcgcggttacgcaggccacgttgagccgcgacctggatgagatgcatgcggtgaaaacccggctgaaggacggtacggtggcctatacggttggacgtggttcggcggttgccgatgttgaggacgtgggggagcgcaccgaggctcagatggctcgtgtgctcaatggtctggtcacttcggtggccgctgcccgcaacctcgttgtggtgcataccccgtccggagccgcacaatatgtggcttccgtgattgaccgtcagcccatcgacggcgtgcttggcaccatcgctggagacgataccgtcatggtgatctgcgctgacgacggcaccgccgtctcccgctctgactggctgctcggcctcgcctccaaatagtgttttttcttgcccccccccaaggtgaggggagctgtcaccgtaggcgactgaggagagttgcccaatcctccccaacacgccgtgcataaatatacaatcctctgtatatacttacatcagtttgtttttttggaccttgaatgaaagggaactcatggcagataacaatcgccttgttctggcctactccggtggtcttgatacctccgtcgccatctcgtacctgaaggagcgcaccggcaaggacgtcgtggccgtgtccctcgatgtaggtcagggcggtgaaagccttgagaccatcaaggagcgcgccctcgcctgcggcgccatcgaatcctacgtggtcgacgcccgtgacgaattcgccaacgaatactgcatgaaggccctcaaggccaacgccatgtacgaaggcgtctacccgctggtctccgccatctcccgcccgctgatctccaagcacctcgtgcgcgccgcccaccagttcggcgccgacaccatctcccacggctgcaccggcaagggtaacgatcaggttcgtttcgaggtctccatcgcctccatcgacccgacgctcaaggccatcagcccgattcgtgatctctccctgacccgtgacgtcgagattgcgttcgccaaggaacacaagttgccgatcacccagaccgagaagtccccgtactccatcgatcagaacgtgtggggccgcgccatcgagaccggcttcctcgaggatccgtggaacggtccgaccaaggactgctactcctacaccgacgacccggccttcccgccggtcgaagatgaggttgtcatcgagttcaaggaaggtatcccggtcaagatcgacggccgcgacgtcactccgctgcaggccatcgaagagatgaaccgacgtgctggcgcccagggcatcggccgtatcgacctcatcgaggatcgcctggtcggcatcaagtcccgcgagctgtacgaggctccgggcgccgtggccctgatcaccgctcatcaggaactcgaaaactgctgcctcgagcgcgaacagcaccgcatcaagcgcgatatcgacaagcgctggggcgagttggtttacgatgcgcagtggttctccccggctacccagtcgctcaacgctttcatcgaggacacccagaagtacgtgtctggtgagattcgcatggtcctgcatggcggtcgcgctgtggtgaccggccgtcgttccgactcctcgctgtacgactacaagctcgccacctacgattccggcgataccttcgatcagaagtcctccaacggcttcatcgacatctacggcctgccgtcccgcgtggctgccgcacgcgatgtcaagttcggcaacggcatcgaggtcccgaagaacaccgtcgagtaatcacttatcttggctctcctctttgaggggccgaaccgtaaagcaaacagtccagtgggctgcttgtaggtgaggcgcgaacgacagtgagccaacaatcagcagccgtccggctgcccgtaatcacgggcagctgtcgccgcaggcgactgaggggagttcaagcaaaatatgcttgtgctccccttttttgtatcggaatatgaagtcattttgtatgctctccaacgaggatgttaacagatcatatttggatcccaaagccgttgataatcagggaagaacgagatcctgacatgttacgttcctagccgtttggtttaacgggtgggaaacaaagcggtgtttttggtctttcgctgagaacacggctctatcgttgatgaaccagcatctctcgaaacgtaaggccctgaaggaggctattccttatcttgagcgtttcggtttgggagagtattcgaacaagccgccatatgccatgtctggaggtatgcggcaacgtgcatcattcgtcagaacgattttgacaggtaaagacatcctgctgttcgatgagccattcggagctggggctgcggatgttttcttggagactgagcgaaaggtttttcgtatgtccggtcccgaagaacgggagcgcgcggtgggcctgtatttcaccacgccgatgaccacggcccaggtgggtgaggcgcctgggctatccgaccaggcagtgcccggaacgccggttggcgaaggattccaggtatgccggtcgtatggcggaacccatcatcccgctggagacaaggaccaaggcgatcggaaccggtgccgggcggcggaagcgggccgccgaacggctcggcgcgggcgtcggagcggtccacgaccgggccggggtgtacggggtggaatggccgcgttacgacccgggaacgggaacgccggccaggccgacaagccggcgccgcggcgaagccggaacgccggagccgtctgcgatgacgcggaggcgttgcgtcgcggggtcgaggagctggggctggaggacgcgttgatgcgggaggtggcggaggtcgcgggaaaagacccgggcgccgatccgcggcgcctgtcgaacagggagaagaccctgccggccgaccgtccgcgcccggcgtattcgcccggctcgatgacatgcctgcccggcatcgcgccgggcggccaccactgccgccacgccaggctgagcgttgacggatacgccgggctcgggacggaggcggcggaggcgttcgccgcgtccaagggcaggtacgggtaccgcgggatcagggccacgctcgggaccggcgtatcggagaaggcggtccgcgggatcatggccgagggcgatccgacggcgcacgtgccgagacgtcggcgctacggctcccacgagggcgaggccacgcccgcgcccggcaacctcgccgaccgcgacttcaccgccaagtccccgaacgagaagcggcccgcggacatcacccgggatatcaaggccggggacgggaagggcgtgcctctcgccgccggtcgactgccatgacggcgggatcgtcgcgtgcaccgccggttccggtcccgacgccgggctcgccgacgggatgctcgtcaaggccgcggagacgctgccggaggggggcgaagcccttggtgcattccgaccgcggcttgccaactgccggtgccccggatggccggacctcatggaacggcacggcctgatatggtcgacgggcgcgaagggccgttccccggacaacgccgccgcggaggggttcttcggcaggatgaagacggaatccgtccatcccgggcattgggaggaacgaccccgcggcgagacgctcgtcccggtcggcgactgcatccgctggcacgaccacgggcgcatcaaacggtcgcccggttggatgagcccggtacaataccgccagagccagggaacggccgcgtgatcatctccaagaaaacgcccgcagccccttatcccaaggcttatctgaatatgccagagattggggaaataacctaattcgaaatattggcatatgcggtggtgcggcgctcacgtatgcgtacgccgcactggtctcatcaagcgtcggcggagtgaaaggcctgcggtttagtgctctccgtaatgagttcggcagacggctatttctaggttttgaacgtcgttacccgtaatgcggtatacgatgcggttcttttcatcaatgcgacgtgaccagtatccggtgagattgccgcgcaaaggttccggcatgccgatgccgtctgacgcgccattgcgttggatatccttgattattttattgatgcgtttcaatgtctttttgtcttgtgactgccaatacaggtaatcgtcccatgcttcgtcggtccaaattaagagcatattagttctcaatcagttggtgttcagtgccttttcctgcgtcaagttgcgcggcggcgtgacgtaccctgctcatgttttccgccgaatagaacggatcagcggttacctcgaatggaatacggcgttcccggacaacggttttggcaaagatattgaatgcggcgctcatgctgatgccaagttcgctgcatacttcactcatgcccttcttggtgttttcgtcaagtcgaacgttgactaatgttgatgtcatgttgcgctccctgtatatcgtttgcgtatatattcaatatatatctgtgcggtcttttgcacaatagtgccgcatcagtgcatctctataatgagcggacagttggcaatgcgtctgatattcccgacatggaatacgaacaacttgaatccaccggtatgtagcccaacgctgatagtctgacaagcagtctgatttgtttgcaatccatggtttcaaggagccttcatgactgagaacaacgaacatctggccctgtggggtggtcgctttacatccggcccgtcgccggaactggcccgactgtccaagtccacgcagttcgactggcgtctggccgacgacgatatcgccggttcccgtgcccacgcccgtgctctcggccgtgcgggactcctgactgccgacgagctgcagcgcatggaagatgcgctcgacactctccagcgccatgtggatgacggttcctttgctcctatcgaagacgatgaggatgaggccactgccctcgaacgtggcttgatcgatattgccggcgatgagctcggcggcaagttgcgtgccggccgttcccgcaacgaccagatcgcttgcctgattcgcatgtggctgcgccgtcactcccgtgtgattgccggattgctgcttgacttggttaatgccctgattgagcagagcgaaaaggccggtcgcaccgtgatgccgggccgtacgcacatgcagcatgcccagccggtgctgcttgctcaccagcttatggctcacgcttggccgctgattcgcgacgtgcagcgcctgattgattgggacaagcgcatcaatgcctctccgtacggctccggcgcgctggccggcaatacactcggccttgacccggaagcggtggctcgcgagctcggcttctcccgtgtgaccgacaactccatcgacggcaccgcagcccgtgacttggtcgccgaattcgcattcgtggccgccatgaccggcgtggacatctcccgtctgtccgaggaaatcattatctggaacacccaagagttcgccttcgtcaagctcgatgacggctactccaccggatcctccatcatgccgcagaagaagaacccggatatcgccgagctcgcccgtggcaagtccggccgtctcattggcgacctgaccggtctgctggccactctgaagggtctgcccaccgcctacgcacgcgacctgcaggaagacaaggaagcggtgttcgatcaggtcgacacgctcgaagtgctgctacccgcgttcaccggcatggtcagaaccatgcgcttcgatgccgaccgtttggaagctgaagccccgaccggcttcgccttggccactgacatcgccgaatggcttgtcaagaacggcgtgccattccgccatgctcacgagctctccggcgcctgcgtcaagctcgccgaaggccgtggccaggaactctgggatctgaccgacgaggacttcatcgagaccttcgccgcattcctgccggccggaaaggctccgggcgtgcgtgaagtgctctccagccacggttcggtcgactcccgcaacggcaagggcggcaccgcctatggtcgtgtgcgcgagcagattgccgacgccaaggccagtgtcgaagagctcaagttgttcccggcctccacttctgacggttccgcgtataaggcccccggcacgttttaaactgtgcgctcccgttggcgggggctgtcggcgaagccgactggggggcgaaggtctttgtccacatgaccaccctcagtctcgctccgcgagccagctcccgccagcgggagttaggttttgcgttgtcatcgcaacggcctacactgaataatcgtaacgaacgggagccgtaaggctgagaggaagttgccagacttcgaccggggaacttgacgcgggtcatgccgccgtaaggaatcgttgttcttgatttgttaggtttcctgcaacagtctttcattccgtttgcataatttagccgtatgacaggtcgtggtgtagccaatgcatcgcggcggccacacggtcgcatgattgggttcatgaatgggcgcaccacttaaggtacggttcgtttcgtgcacccttttttactattcggaaaggttgttatgcaggtcaacggagagcaagtcaagctcgatacgccggtcagcgttgccgactatctcgaagcacacggattccgcgccgaacgtgtggccatcgaacttaatggtgagattattccgcgcgacaagtgtgccgatgccatgcttgacgaccagtgcgttatggaaatcgtacagtttgttcagggtggctgaaaggaagagctatgagcaatatcaatccggttactgaagcatccgttgaggcgacgccgctgccgccgcagcccgccgtcaccaatccggtcggtaccgctgcgccgattctgccggtggaagacaagccgctgaatctgggaggccacgaattccagtcgcgattcatcttgggctccggccgctatgacctgaacctcatcaaggccacggtcgagcacgccggtacgcagattgtcaccatggcattgcgtcgcgcgcagaccaccgagaacagcgtgcttgattacattcctgagggcattacgctgctgccgaatacttctggcgcgcgcaatgccgaggaggccgtgcgtattgcacgactggcccgcgaagtatgccacactgatttcgtcaaggtcgaaatcgagcatgaaaccaagtaccttctgccggacaacgccgaaaccattcgtgccactgaaatgctggccaaggaaggcttcgtggtcatgccctatatgttcccggatccaatcgcagcccgtcagcttgaagaagctggtgcggccgcagttatgccgctcggctcgctgattggttccaacatgggcttgcgcatgcgtgatttcatcgagatcatcatcgccaacgcgcacgtgccggttattatcgacgccggcatcggccgcccgagtcaggcttgcgatgccatggaaatgggtgcggatgcggtgatggcgtacacggctgtggcctccgctggaaatattccgttgatggctgaggcgttcaagcacgccatcgatgcgggtcgtgcggcctacctgtctggtctcggcaaagtgaccgaaggccaggctgtgccgtccagcccgaccacagggtatttgcactgattgggtattggctcccctttctgaggggagctggccgtgcagcggactgagaggaattcgcgagacagcgttaaaacttcctctcagttacctgtgatgacagcgtccctccggagagggcagaaacatggagaaaacatggcattgacggatgaacaggtggagcggtacgcgcgtcatctgattttgaagggcgtgggtgtcaaagggcagaagcgtctgctggcttccagtgtgctgattatcggcgcgggcgggctcggttcgccggttgctctgtatctgacggcagccggagtcggtcgcatcggactcgtggatggcgatatggtggatttgagcaatctgcaacgccagattatccacaccactgcacgggtgaacgagcccaaggtggagtcagcggctgcggccatccgcgaactcaacccggacgtgacggtcgacacttactatgagcttgttgatgccaacaatatcgccggcctcatcgaggcatacgatctggtgatagaggccaccgacaatttcgccgcgaagttccttatcaatgacgcttgtgtattggccaataaaccgtatattcatgcgggtgtggtcggattcgcaggtcaggtgatgaccgtcattcccggtgaaggcccgtgctatcgctgtattttccgcgacatgcctgccgctggcgagattccgacttgcaaggaagctggcgtcttgggtgcggtggtcggcgtgatcggcagtctggaagccactgaagccgtcaagctgatagttggcgtgggggagccgttggtgggccgcatgctcaccgtggatgcgttgaacatgaatattcgacgggtgccattgccggagcatgtgccggattgcccggtgtgtggtgagcaaccgaccatcaccgccattgactcggccaactatattcagccggcctgcgcgatttagagctatatggctccctctctgaggggagctgtcaccgtaggtgactgaggggagttgctacggttgagcaagcctcccctcagtccgctacgcggacagttccccctccagaggggagccaagatcagaacgagaggggaagaacatgcctattgctttgcataatatggttgatgccgatgagagcggtgagtgtgcgtatcgtcacatcacgccggaagaattcgccgagctcgacccgaatacggttacgctgctcgatttgagggaaccggccgatttcgccgctcacccggtcgaaggtgccatcaatgctcctcttgatccattggctcatgtactcaaaaccgtgcccaaggatcgaactgttgtggtctattgcgcccaaggttggtggagcgaggaagtggccgaaattctcgccgatcgcggttacgatgtggccagcctctatggaggctttcaaggctatcttgattatctcgaatcccaccacgattaacagctcaacagccgattggccgcaacgtatctctgacctctcggcgcaaggaattctcgtaataatccctgatttcgagagatctttgcactgactcgtgctaaacgcaaagatctctcgaacagttcctattgtcgttcttttggatgagtgtgcacggtaatgtgcgtgccctacaatcggtcacggtgttacccgataaatacttgaatgttgtcgggtaatcacatggaatgaaccgaaccagcccgaacgggaaggacgaaaccgtgggacgcctgctcactcgagcgcagattcaacgcttggtcgccaagcatggccgtgaagtcatcgaacatcagcacatgcagatcgaacgttgctgctatcagcacggcaatgtcaccacattcgagcattccatacgtgtggcgtgcctcgccgtttggctggcggatcgcgcacatctctggtaccacgtgaatctcaggtctctgattcgtgcggctctcctgcacgactacttcctgtacgactggcacgactgggacaacgggcaacaccgttggcacggcttcacccatggccatgcggccttgatgaacgctttgaaggattttgacctcaacgacatcgaacgcaacagcatcgaaaaccatatgttcccgatgacccctgtgccgcccgcctatatcgaaggataccttgtcacgttgtcggataagctttcggccaccgccgaaacgttctcgttcgaccggttcaacaagccacatctgccctcgttggaggcacacatcaaacaccgcgttgcaaggtgattaccgccgatgatgattgcgcttgaacactacttcctctggttcctgttctacagctttgtgggctgggtctatgaatccatccttgtttcttgccaagaacgtcgcttggtaaaccgtggattcctcaacggtccgctgtgcccgatttacggcaccggtgcggtactgggcatcgccgtgctcggcaatctccataatccaatcatcatctttctgatttcgatggtcggcgccacgattcttgaatacacgacctcgtgggttatggaggagctcttccacgcacgttggtgggattactcgaatttccgtttcaatgtccaagggcgtgtgtgccttttaggggcggtgattttcggtattgccggtgtggtgattgtgctcggcgcccaaccatacgtggcacagttcactgacctgattcctgtgccaatgctgcacacgttggtcacggtactggctctggtcaccatcattgatttagcggtcacggtggcaggcatgctcgaattcgagcaggtgctcgactccgttactcaaacggtgcaggatgtggctgcacgagcaggtgacacgtggcaatggggttccagtgcggtatccgataagatgcgcgagctttcgcaggatacgattgagcgtctacgttgggcagccaacggtgttatcaacgcgcagcagaagcgtatgctcaagtccttcccgaagttccaggtgccggatcgtcaggacatcatcgactctttgcgcgaacttatgggcccgcgccgctgattgcagggtttttacatgaactatgaccccgcgccctcaatgccgttctccttggccacagcgcgcagatacgcatagtattcggcgaagaacgccgcgttgtaaccattggaatagaagattccgctcaggccgactgtggcaccattgagcagataccagacgaggaagctgacctgcgccacgaagcactcccatttgtggcccttcattatgcgccgggagaggctgatagcctgattggcactgatgttcgggttctccgccacgatgtacggcacgaggaagtacgaataggttttgatgatgccgcccacgaaagtcaaccaccacagcatcaggtacgcgttctcgaccatcatcgtccatgccatgcgcacccaacgcttggattgcagcgggtataggaaccggcgcaacggcactttctcgtagattcgggcctccagcatgatgcgccgcagcaccacgcggaagacctgcactacgaacagggggaatgccacagtacccagcagtgccacgatcaccagaatggatatgacgatgttctgcgcatgaatgacggacgtggccgcatccgccacggacaggatgaacgatccggaggaaaatgagttgagtgccgcggaaagtacgccgcgggagcggccgagcgcggcgatggctttctcgttgctgttgacttggtcgcgtgcgtcgcttccctgccccgacgctatctccatcagaatgtccagcgggccggatgcatagtagccctcgccaggggcctcggcggtggtctgtgcatcggtttgtacggaagtctgagccgtgccggaattggtgtggatggcaatcagcgaggagccgtattccgcacccagaaacgccgcgaacagacacgcgataacaatcagccaataacttcgcttcagagtcttccgcgcctgtgccttgagtgcttttctctctatcgctgctcccctgcttagtagccactcccaactctagtggaaatgtgacagattgtggcgcattgacaagttatgcactgtcgccatgtcctgcgaaacttgactgtgcccaattgggcggttttatacacaattcgatagggagaagcgacaggctatggctcacgtcaccgacttcaaggaagcgggtttcaacaccctgcttgaggaactggaatggcgcgggttgatttctcagtccacggacagggatcgacttgcggaagcactgaacggcgagcccatcacctattattgcggcttcgatcccactgctgcatccctgcatatcggcaatctggtgcagctcatcaacatgcgtcatctgcagttggcaggccatcatccaatcgccctggtcggtggcgccaccggtctgatcggcgatccgcgccagtcaggtgaacgcacgctcaatccgaaggacgtggtggccggctgggccgaccgcctcaagaaccagatcggcggcattttggagactgaaggcgccaacccggtgcgtttcgtgtccaactacgattggaccgcttcgatgaccgtcatcgacttcctgcgcgatgtcggcaagaacttccgcttgggcaccatgctggccaaagacaccgtggctcgccgcctgaactccgaggaaggcatctccttcaccgagttcagctatcaggtgctgcagggcaacgacttcctccacctgtttgacgaataccactgcacgttggaactcggcggctccgaccagtggggcaacctcacctccggcctggacctgattcacaaggtgcgcggtgtggacgtcaatgtgttcaccagcccgatcatcactgatgcttccggcaagaagttcggcaagtccgagggcaacgccgtctggctcgatgccacgatgctcagcccgtacaagttctaccagttctggatcaaccgcccggatgtggagatggaaagcctgctgaaggcgttcaccttcctgcccaaggccgaaatcgaacgactggtcgaggaatccaagaccaaccccggcaagcgcgaggcccagaagaccctcgcctgggaggtcaccagcttcgtgcatggcgaggccgctacccaggccgccattgacgcttccggtgcgctgttcggacgcggtggcaacctcgaagacatcgatgaggaaacgctggaatccgtgctcgacggtttcaaggtggtcgacgagaacggcgagcacgtcttccccgtctccaagcccggtgatcgcgtaatcgacgccgcccaggctgccggactgttcaagtccgcttccgaggcacgccgcgccatcaagtccggtggcgtgtatctcaacaacaaccgtatcgaggatgaggagcaggtgctggccgaagctgacttcctggccggccgcttcgcgctcatccgtcgtggcaagaaggcgctcggcgccgtggaaaaccgttaatcaacaacgaattaaggaaaacaagtaatggcagaaggtaacgagcgttccggcaagtcctacggcggcggccataaggggtatggcgatcgccgaccgggcaaccgcggtggcaagggtttcaagccgcgcggcaagggcggtttcaagccgcgtcatgatggtgagggtttcaagccgcgtcgccgcgaggatggcgagggttatgcgccgcgtcgcgatggtgatggtgaaggtcgcggcggctaccgcaagtcgtacggcaagggcggcgacttccacaaaggtggtcgttccggctaccgcggcaatggtccgcgtcgtgacggcgaaggcttccgcccgcgtcgcgaccatgatggtgagggtttcaagccgcgtcgccgcgaggatggcgagggttacgcgccgcgtcgcgatggtgatggtgaaggtcgcggcggctaccgcaagtcctacggcaagtccggaggcttccacaagggcggctaccgcggcaatggtccgcgccgcgacggcgacggtttcaagccgcgccgcgagggtggctaccgttcccacgaaggcgagaacggcgagaacccgcgctaccagcaccgcgacaatgatcgccgtgatttccgtcgcgatggcgatcgtcgtgacttccatagggatggcgatcgccgcaacttccgtcgcgatgaccgtcgtgacaatgaccgccgtgacggctaccgcgagttctctcaggaggagaagcgccagtaccgtgaggagaagcgctctgaatacatgaaccgtccgcgccgcaattccgacggcacgatgagcttcccctcgcagaacccgtacaccgatcgtcgccctgacgagccgaagatgcccaagggtatggaatggtcgatgctgtcctcggatgagagggagcgtctgcgcggcctgtccaaggagcacgcggagaacatcggtctgcatattctcgccgcctttgcgcaggaggaggacgatcctcagaatgctctcgagcatgccaagtgggtggctcgtcaggcttcccgaattgacttcgcccgtgaaacgttggcattcatcgcctaccgtcaaggcgactacaagctcgccttgcgcgaattccgcaccgcttaccgcatgaacggattccaggactacctgccgttcatcgccgactgcgagcgtggtcttggcaacccgaagaaggccgtggaactggcactgtccgacgagggcaaggcactgcatggctctccgaaggtcgagatgttcctggtgtacgctggcgctctcggcgatttggaaatgtgggataaggccattgatgtggttcacgccgtcggacgttcgcagggtctgccgggggagtaccgcatgcgtgcggtacaagccgaacagtatttcctcgaggaagccggccgcaacaaggaagccgagcagcttaacgatttgcttgaccgccttgaagaccagtacgccgacgaagacatcgacgaggatagcgatgacgtggtcgttgaccatgatcttgaggacatcaccgacgactccgaagtgatggaaaccctcggtatcgacccgtccgaagcacagtatgctccggagcttgagcctgaagagtctgaggagcctgaggaatcagaagacgccgaggaaccggaagatgatgaagctgcggaggaatccgacgtagctgaatctgatgccactgaggagtccgaggagagcgacgaaccggccgaatccgaagagtcggctgatgatgctcccgccgaagccgaatctgaagaaaccgaggagtgagcggcgtaatgacccgttttctcaaaggcaccgatcgtccgcttgccgaggcctatcagcttgcgctgctggacctcgacggtgtggtgtaccgcggcaagaacccggtcgactatgcggctgattccatccgcgctgccgaacaggccggcatgactatcgagtacaccaccaacaattcctcacgattccagcatgtggtggccgatcagctcaagggttttggcctggatgtggaaccgtggcaggtcatcacctcctcggtggtggcggcccgtatggtagccaaagcgttgccggccggtgcgcgcgtgcaggtattgggtgccgatcatcttcgtgatgaggtcacgcgaaacggtttgaccatcgtgaatggcccggaagaccatccgcaggcggttattcagggatggtatcccgagatgacgtggcagatgatggctgaagtctcctatgcggtcgaagccggagccacatatttcgtgactaaccgtgatctgaccattccgcgtgaaatgggcatagcgcccggctgcggctcgatgattcgagccgtgatcaccgccactggcgtcgaaccagtggcctccgcaggtaagccggaagcctatatgtacgatgaagcgcgtgaactcaacgccgccgaagatcatgacttggtgcccaaagagtcgtccatcgccatcggcgatcgtctcgacacggatatcgaggcaggcaaccgtggcggctatgattcgctggctgtgttgaccggcgtgaccaacccgaccgagcttatgctggctcccgaacacttgcgccccacgttcatcgcccgtgatctgcgcgagcttggcgagattcagagcgaaccggtgcgttgcgaggacggtacttgggagtgccgcaaggccagcgcatggtttgaaaacggacgggttcaggtcagtgatcccacgagtatggatggtcttcgtgctgcggtatgtgccgcttgggaagccgccgacaaaggcgcgcagatggatgaatccatggtgccgaactttacccttggagagcagtgatgaacagcgaacctcagtcagccggccgtacgccggtgtcgcaacggtacccggatcttgtggatattgacaatcaggacaatgaccgcaagctcgagatttaccgcaatgtgcttgactcattgcacagtgagctcgacgagagccgtgactgattgatgtcagaacatccgattgatcccgcaatgccgcttgaccgtcttgacatgatgcttgtggcctccgatctcgttgagtcccgatccaaggcgcagcgccttattaaggccggacatgtgcgtgttgacggagagaccatcaccaagccgtcattcatggtcaaagccggtcattgtgagcttgccgtggataagggtgatgattatgtctctcgtggagcttacaagctgcttggcgcgttcaaggcctttgccgacgatgggctgaccgggccgcaaagtctggaatgtttggatatcggtgcatccaccggtggatttaccgatgtgctactgcgcgggggagcggccagagtcgtggctctcgatgtggggcatgggcagcttgacccgcgtattgcaggagataaccgcgtcatcgaaatgagcggcgtcaatatccgtgaagtcacggccgatgatttgccatatcgcccggcgatgatcgtgtccgatgtctcgttcatttcactgacctatgtgattccggtgattgcgcgcatcgccgctcccggcgctcaggtggtgctgctggtcaagccgcagtttgaagtcggtcggcaaggactcggcaagcatggtattgtggacgatccggcattgcgcgagcagacccttgccgatgtcgtcgcctgtgcgcggcagcacgggctgcacgtcgtcaatacggccgacagtcccattgaaggcatgcacggtaatgcggaatatctgctttatgcggttttcaaatgatatcttcggcattctcggttgaccagcatcacacaggatgttcggtcaagacctattgaagtcgagcaaatagcatgctccaccatgctgttatcacgcaatatggcagtgccggcttgtaacgtacggcacgtcagccgatgagcctcgatcttgttgacgtctatatgcgaggctgagctgcctccctcatatttcagcatgtcgaatctggtgaacatcgcgctgcgcaatggccggatctccagactgctgccgttgatgcgatgcccctgaagcacgccgtggagcagaatgttgcgcgcgcggatatgacggctggtcagcgatcccttaacgagcaaatcatcgttacacgtgacatctccgccggagtgcaggtcgccggtgagctcgatgccgccgcagatgatgctgccatcggtgatgattctgcctctgccggcaatgcgctcgacatgaacatcgccggaacatctcactgtaccattgtcgacaatcagctgattgccggtaatggtgtttgcctcaagcgtgccggtgaccatggtggtgcgaaaacgtacatcgtcggcgaatgtggtacgggtcgtcacggtaatgagcccataatttccgttacgtacgtgccctgtgttgccggtgtggtgatgcaagatacctcctgtgctttgcgtaccgcaagtgtcatcatcgttgatgagctaatgctaacgtttgcattatgggtatatagtaacaggacgggggtatcgcgagaatcagccttggataaagcggtcgatctgatcctgcttgcccatgatgatgagctcatcgttgcgatgcataatcagttccttggaaccgtactggaattccttgccggggccttgatgccgaccacggtcacaccgtacttgtcatgcacctgcacatcctcgatgttgcgacccaccgcgtacagcggggtgtgaatcttcacgacgttgtatgggccgtcgatttcgatgtaatccagatagttgccagccaccagatgacccacgcgcttgccggcatcggtttccgcattgatgatatggtgggcaccaatgcgctgcagaatgcgggcgtgcttctgagagaccgatttggcccacaggtcggagatgccggcatccaacaggttgccggtgatggttacggaagcctcgaccgacaatcattgcggccgcaagaatgaacaggcatgctgggttgccggcgctggccacgcctgcggaataaccacccaatgcgactatcgaagcaaaggtcatcacgccaagtccaccgaactggatggaaaacaggatgaccaacttggccgaacatcgaccagtactcgccggtgttcaccaccggaatgccgcaggtggacagggcggaaaccgcggtgaagaacgacaccggaaagttgctgaagccatcgtgattcgtagtggagatgggcagcgtcaataatccggtcgacagcaatatcaatacggaaaaatacagaatggacaggcggcccggatgcctgatgaggcgatccgtgagcttcatgcgccggatgcgcttggaggcccggtcgtccttgtcttggctgattacgtcggtcgagtaccaccatgacaggcctttcgaggtctccttgtttgaggaggactcgtcaaagtcgttggacatggttcctgcttcccgccatactgatggcgtaatggtgtatggctgtaatcgtaagccgaagcctcacgataatcgactccgcggaacagcatgcggtgtgcaatagtatcgacgcccatatgttggccttgtctgatgtccgagggccggtgacgtgatgtggccgatggctcaggcgatgattaggatagtcatcagtgcgaccgattcaataggaggatgtccatggccaagcgcaatgcggttgtggtgacgcataccaggctcaggcagtccggcacagtggtgtccgaggcggtgagccagctgcgcagcgccggctttgaagtcacgattatcgataacaccgaagctccggatttcggcgtaagtcccgcatgcgtgacggacgacacggaaatcgtcgtggtgctgggcggcgacggcacgattcttcgcgcggccgagctcgtgcattgcacccaggtgccgattctcggcgtgaacatggggcatgtcggcttcctggccgaattcgagagcttccagatcgacgaggcgattcggcgcgtggccgaacatgactattccattgacgagcgcatgatcgcccatgttgatgtctggctacccggtgccaccacgcctatcgaggattgggcgctgaacgacatcactttggaacgtgccgatcgtggcaagatggtggagctttccattcgcgtggacgatgtggaaatgaactctttcggcgccgatggcgtcatcgtctccacgcccaccggttccacggcctatgccttttccgccggcggtcctgtgatttggccgaatgtcaaggctttgcagctgattccgttggccgcgcatgcgttgttcgccaggccgctgatcatcggctccggctcgaccttcaccatcgatatcctggacgattccatgtccgaaggctggatttgctgcgatggccgccgccagcgcgccctgccgcagggtacgcgcgtcatggtgcgcgaatcgcgcgatacgttgcgcctcgcccgactctccggtgtgccgttcaccaaccgtctggtctccaagttcgatctgccggtggttggttggcgtgagcatgcacgaaatgaggcctcgggccagccactgcatcacggacacacgttcccgactgccgctgatgccgtgtctgataggacggacgagcataacggcaaggcggagggctgatgctcgaagaactcgatattcgtaacctagggccgattcgggaagcctccatcgcgcccgcccgtggcatgacggccatcaccggcgaaaccggtgcgggcaaatccatgctgctgtccgccattcgtctggtgtccggcgatacggccgaatcctcgcgggtcgccgcaggagcagacgaggcatgggcgcaggcgatttttgcgctggacgatgatgctctagccgcagactccgggaaccatggtcaggacgattcttcacgtgatgccgatgacggcgatcctgcggccctcattggggtcgcggcggctattgcccgagctcgcgatgcgggcgtcgaacccgaagacggtgagctgttcctctctcgcactgtgccggcttccggccgatctcgtgccgtacttggcggcaaatccgtgccgcgatctgtgctcggttccattgccggagaattggtgaccattcacgggcaggccgatcagctgaaaattgcctccgccgcacgtcaacgagaattccttgatcgtgtggccggcgacgaggctgagcttgatgcttaccggcaggcatggaatgagctgaccgccatggatgagcggttggggcgactgcgctcgcaggagtcctccgctcgtcagcaggcggactatttgcgtgaatccatcgaccgtatcaaccgtaccaatccgcagctgggggaggacgaagaactgaagtcgcgtcgcgagcgtatcgagaacgcggccgatatcgcccaaggagtgggcgcggcgttgggcgcgttggatgcctcacaggtggatgccgatgcgggtggtgcgtcggccgtagatctcattaaccatgctgtgacttcgttgcgtgcgattcgcgtcggcggcgagttcgccgagcaggcagatcgattggaatccatcaatgccgatttgggtgacgtagtgttctcgctcactcaagaattgggcgatgagggcagtgtcgaagaccttgaccagatcaacgggcggattcacgagctgaacgaactcactcgccgttgggggccgaccttggcggatgtgattgcgtggcgtgacaaggccacgttcgacttggaggacctggacgcctcgccggagaaagtagccgaactggaggccgaacgacagtcgctgtacagtgcggctttggctgctgccgatacgttgagcgccgcccgtaccaaggccgccgcatcgttgggtgctcgtgtggccgatgagttgagctcactggctatgtctggtgcgtcccttgaggttcgtgtcacccctcgagaattaagtgacggccatgacaacgaccgtgaagcggcggctggtgattcagcgggggacactgggcctctcgagccgtacggtcgcgacgatatcgctttcctgttcaccccgtttgagggttctgcgcagttgccgatgggcaaaagcgcttcgggcggcgagctcagccgattgatgctggctctggaacttgtggcggcggacgtccgtggcggcagcgaccagaccttcatctttgatgaggtcgatgctggcgtgggaggcaaagccgcagtcgaattgggcaaaaggctcgcgcgattggctcgcaacgcacaggtcatcgtcgttactcatctggcacaggtggcttcttgggcggacgctcagttcgtggtgtccaaggaatcgcaaggcgcgggggacgagacggctggcgttgcaaccaccgtcttggaagtacgtgacgatcaacgtgttcatgaaatcgcccgcatgctttccggcagcgaatccgaagcgtccctggaccatgcccgcgaattgctgaaggattccgcactatgaccaaagcagccatattcgacctcgacggaaccctgctcgactccatgggcgtctgggaccaggtagacatcgactttctcggcaagaggggcattgaggtgccgccggattacatgatcaaggtctcctccatgcagttccagcagatcgcggaatacaccattgcgcgtttcggcctcaaggacacgcctgaggggctgatgcaggaatgggacgatatggcccgcgtggcctattccaccacagtggaggccaagcccggcgcgctcgactatctgcgtgatctcaagagtgccggggtgaagatgggcgttgccacatcgttgccaccgcagctgcgagagccggcgttgcgacatgtcggcatgctcgacatgttcgatgacatcgtctccgtcgatgacgccaatgatgtcggcaaggaccagcctgacgtatatctgctcgccgccgagcggctgggcgccaagcccgctgattgcacggtgtttgaagacctgctgatcggtatcaagtcagccaagtcggtcggtatgaaagtatgggccatgcacgacgattcgtctgatgccgactggcccgaaatctgcgatatcgcggacggcgtcctcttcgattttcacgacgccccacgtccgttgtaagcacatacaataagcccctctgatgagggactcccgcgaagcgggtgggggagaaaagtcgtggcatgagccgtgcgattcaatatcgggcacagcccgattccacttgcgcttactcagtccctaccgtcgagtagtcctgccagactgcctttcggcctcaaaccgttgctcttccagcttctcaccctccgcacgcgcggactcctcagcggcgatacgctccagcagcatgctgaccggcgcttcgtacaccatctcatcgaaccaatgaccgccacgctccaccgcgtgctccgcgcgacccgtctctttgaatctcaatgactcatacatatgacgtgcccgcaggttgaacgaccacgccttcagcgtgatggtcttcgcgccaagctgctcggcggccagcttgatgccgagcttcatcgccaagctgccgtacccgtggttctggtagtacgggccgatgagaatagtcatcgtggcgttgtggtcgggcgcggtgcagtccttggcgatgatatggcccaccggatgcccgtccgggccgagggtcgtgcggccgaagcgccggtcgtcatcctcgtcgctccacgtatggaacatctggtcgatggtcttgtccggcactttctccatcgtatgacggcaatcgtcggcgatggcgtgatcgttccaccagatctcaagctccggataatcgttcggttcagtatggcgtagcgtaacggcgttgttcggtataggtacccctttccgaggccattgtaggcacggcccatgtttcgacactgtatgttggcgatgtgtttgttcactgtttagctgttatgtaacacaccttgacagttaagcagaacagttatactgtgttgtataacagctaaacagctggggtgctagtcaaccacaatcgaaaggggcataggtgaaactgatcatctcatccgtgtccggtgaacccatctacgagcaaatcaaaacccaaatccgttcggcggtgctcagcggcgagttgaaggcgggcgaggccctgccttccttgaggaaactcgccaaggagctgcgcatctccgtactcaccgtcaccagggcgtacaacgaactggccgatgagggcgtggtacagaacattcaaggcaaaggcactttcgtgatggacaagggcaacgaactgatgcaacgtcagctcgaaacccagattcgtgaaagcctggccgaggcaagccggggcgccaaagccgccggcattccgctgaacgcattggaccgcatgctcgaagaggaataccgcaaggaataacctcaagaaaggaccatggacatgaccgccatatccgaatccgacgcgatggcgttgcaggtcaccgacgtcaccaaacactatgattccggcttcacgctggacgacgtgaccttcgacctgcccaagggctacatcatgggactgatcggcccgaacggcgccggcaaatccaccctcatcaaactcatcctcaacatgatccaccgcgacgccggttcgattcacgtgctcggcctcgacaacatcgccaacgaggagcccgtcaaagaacaactcggcgtggtgtttgacttcagctacatgcatgaacagtggcaagtcaagaacattgaacgtatcgttgcgccactgtatccatcatgggacggtggatgctatcacaagtatctggatacttttggccttggtgacgcacagaacggcaagaaacatatcaaggatctttcccgcggcatgcagatgaagctgatgctggccatcgcattgagtcatgatgccaagctgctgattctcgacgagccgaccagcggactcgatgtgcttgcccgcgacgaactcatggatatcctgcatgcctacattgaggatggcgagcattcggtactgttcagcacccatatcactgccgacctcgaacgtgctgctgacttcattacctacatcaccgatggccgtctctactacaccggtccgaaagacgagtttgaggaatcgttccgcctgattaagggcggtccagacgaactggcacaactgcctgcggacgtagtgctgggctcacatacgtatgccaccggattcgatgcgctggtccggtcagacaggcttgatgctgttgcgtcggtggtttcggggcttgtcgttgaatcggcttccattgatgacatcattcgactgaccaatgcccatgattccaatcgtgacttgagcgggaggtgagcggccatggaggcaatactgagggtgtcgcggtctcggcaacatgcattgaccactgcattgcgcgtcgatatggcctacctgtgcgtcgacgtacggactgtgttctcgttgttgttggcaccgttgttctccgtcatctttcaaggtgaagcttatggtgatggcttcggctatcgcatgggtgtcatcatgacggtattcacctgcgccatgtgggtgctaaccatggcggttgctgacttacagaacggatatcgacttcgtggcattattccggcttcgaggaagagtcaggtggccgcgcgatatgtggttggattggtgatttccgtattgtcgatagcgatgattgttctgattgacgggttgcaagtgctggtcaatccagattggtcattcgcgggcaatctgtgggcggcgccgttgggaggtttctgcaccgcgctgatggtcgcgcttatcgtgcccacgggttatctgtggaccaaactaggcggtcttcaagtcacgatgatggtgatctatgtcgttgcattggctgtatccatactgctatctattttgcctgcttcggtgaccagaggattggcccatgccgcgaatgccatcatcgcgcaacgattgtggctggttattgcggtattgacaacgacggttgtggcatatggaatctcgtatgtaattgcctctcgcatatttgcttcaagggaatggtgacgatgaactggaaatccgtagtaaagcaatgtcgattcgattgtgccgggatgggtctgtttagcgtggcgaatatggtatttctgctggctctcccgatgctgtctatcgtggtatcgctggtgatgatatcgacccacgtcgatgaacacgttgccagtggtctgatgggcggactcggaggtttggcatcgacgatggcatgtatgagtgcattggggcctgcgtcatccgaggaatctgcagggcacagtgccatgcgagggctgattcctgtttcacgcactgcacaagttgtaggtcggtacctttttctgttggtggttggcctgctctgggctttggacgtggtgatatgcggcggcgtcttcattgtctttggcgatatagcagatatggggtggatcggtaccttggcagcaggtgctttcatcttcgctttggctatcattcttgggtcggtgctgctggcctgtgcataccggttcaccttccgcaagatgatggaggcctctgtcgcggtcatggttggcttgtatgccgtcattgcgctgctggcccgattgcctgttgactggcaatggcttttgctgaatattaccgatttcctgacgatctggtggcatacggcgcttgttctcgccgtgttgtgtctgctcgcatattttggctccatgcttatagccatccgcatctaccgagccaaagaactctagccgcgcatttgtccgaccgcgaatgaaaagagaccgacaggaatctgtcggtctcttttcattgtcggtgtgctatcagtccaccagatccagggtgattggctggtgcggttgctgggaatcgctttcattggctgtgcggcgcgcgcggatggtggcggctgcgcgcttgacggccttgatggcctcctgcagcaccacgacgccgaaaccgaccgcgatgatcttcagccacaagtcgatcggcagcggcacggtgcggaacatcgcgccgccgaactgcaccaccagcacctgcagggcgaacatcagcgcgaacacgccgatcatcaccttattgcgcagcagattggcgaacaggctggcgttgcccagctcgcggctgttgaaggcgttgaacagctggaacaccacgaacagcgtgaacagaatggtcgactgctgttcggcggtgccggaagccacgaaccgggccacctgaagcatgaacaccagtgcggccacaatcgagcccaccacggcgattaccttgccgagcttcgcgagcttctcttgcaacggtgtcatgccggtgtcggcggcgcgcagttcacgggcgatcttgccgaactcggtgtcgtcgcccacagcggtgaccacggcacggccattgccagcggttacgaagcaaccggaatagagcatgttcgtgcggtcggccaccggggttttcgggtcggcgaacacggcgtcggcggctttggcactcggcacgctttcgccggtgagcgcggattcgtcggcggtcagatcgttcgattcgatgaggcgcgcatcggccggcagcttgtcgccggtgccgatctgcagcgcgtcgccgatggtgatgcctcgctgtgaaaccagcgtgacctcgccatcgcgcaccacggtgacggtcgtgtcgttattgatgtcgttcagtgcctcgaacgccttggcgctgcggccttccatcaccacggtgatggtcacggacagggcgatggcgaagaagatacccacgcattcgagaatgtcggcgtggccgccggccatggtgcgggtgatgttgatgcccagtgtgatggccgccgcaatcataagcatgatgagcatcgggtcggcggccgtcttgacgatgcgggagagcatcgattccggctccggcttggtgaaggcgttggggccgtattggttcaggttgtgcgcggcctgttctctggtcaggccttgatgtgcatcggtgcccagcgtgctgatgacggctggcgcgtcctgcatgaacggtgcgggcgtctgcccgttggccgtggtcatatgttcctctcgtctggttgacacaacgcactgaaacccgcgtaatatcactcgcgtaccgcgcaacatggcggcacgcagccaaatgaatcgttgacgaccatgtatcgcataccccgcggtacatgagtctcgtcatttaaggcaaagccagaccgtaacggaactgccgacggccacgatgttgacttgccacattgcggtttgagtcaggccctttaccgcaatgctgtctactccctcatgggactattcagttgcaggaacagaacctgacaaaccacatggattttcccgtccgccgctagcacagcgattcccgccttcctagaaaaatcaagcaacacgccgttggcttgttgcaggtgaaaaggcatacgttattgaggttgcaggtataagggtgtgagttatgggcgattttgcgccgtaactcgcacccttatacctgcaattggctaaatgagccctttctacctgcaaaaatgctccgtaattggtaccgaaatacctgcaatatgtgagagatacgagaattggacgttctggcggatctaattcgaccctttatacctgcaatgactcgacaattgaccgaactgaatattcgttgcaggtagttcggtactaattaacggaagctcacaagaaaacaacgcctgacacatgcctgacaatgcccgtgcatactcggacgcttggcttgcggcatcaaaaaaccgatacgcgccggtaaagcacgtatcggttccaaaaaatgaccgttatacaaacgtcacgtggactattacagtgactgggcggccttttctacgtagtccttcatgccgtcgatggccacgacgtccttgaaacgcacgtcggcggtctcgaggccacgcagggcggccggggcagtggtaccggtctcacaggccagcgcgtccatgcactcgaagtcggtgccggtagcgtcgaagcccagagcctcgttcaccacacgcgggaacttgtaggggctggcggtggagagcagcacacgcggggttagcgggtcgcgcggcatctgctcaagcaggtagtagccgcaggcggtgtgcgggtcgattacgtagtggttctcatcccagcagtgcttgatggattcgcgcacctggtcctcgtcggcccagccggtgccgaagatctggcgaatcttggccagcagctcttccggaatctcgtacgtgccccactggttgaggtcgttcatcagcatggagatcaggcgggtgtcgccctcggacaagtagtacagcatgcgctccaggttggaggagatgaggatgtccatcgagggggagatggtctggaagaacgggcgctgacggttgtaggtaccggtggtcaggaagtcgaacagcacgttgttcttgtcggaagccaccacgaggtgcttgaccggcaggccgagcagcttggcgtagtagccggcgaggatatcgccgaagttgccggtcgggaccacgaactcgacctcatcgccaacgttgatcacctgatcgactagcagctgggcgtaggcggagaagtagtagacgacctgcggcaccagacggcccacattgatggagttggcggaggaaagcaccacgtgcgaattgccggcgaggcgctcggccagggcacggtcgccaaagatgcgcttgaccgcggactgggcgtcgtcgaagttgccttccacagcggccacctgcacgttcgagccggcctgcgtggtcatctgcagctcctggacctgagaaaccttgccttccgggtagaagacggtgatcgcggtgcccggagcgtccgcgaagccggccagcgcggccttgccggtgtcgccggaggtggcggtgagaatcatgatcttctcgtccgcgtcgccgtcggctggcgtggtgtgcgccatgaaacgcggcagaatttgcagggccacatccttgaatgcggaggttggaccgttgaacagttcgagcacgtaatcgtcacccagaggcttcaatggagtgatacgctcgtcggaccactgctcgccgtaggcatcggcgatgcactggcccagttcctcggcggtgaagtcgggcagcagcgtgcccagcacttcggcggcgatctgctggtaggtcttgcccggcagcgaggcgacatccaccttggtctcgcccaatgcgtccgagacgaacaggccgccgtcgtcggcaatgcccttacgaatcgcctgcttggcggtcagcgaatcggtggtgctgcgagtggaatggaaggtggtagccacggttgaatccttattctcgggaatgaaagatactacaaatcttcattattctatcgtctgcctcggtcagacgtcgcggacgtctcgttttgtctgtctagcgacagaaattcaggaaattcgtcctatgctcctaaatttctgtcgctaagaagtactcagtgacagaaatttaggattaatgggtttatttccgagaattctgacgctgagcggagctgagcgacagaaatttagaagtataggggtcatttcctgaaattctgtcgctgaaggatgctggagggatagtgatgagggcaaaaggtcagaaaatatagccgtggggcgcaacaaccgcggaaattacgctgcgttagaccatttggtgagttaggcttgaatgttatgagtgatgaactgagtcctgaggtattcgacgcggtgtgccgtcaggccgatcaggccgcgagcgcacagcaacgccttgcccaggcgaacaccgaagccaagaacgagctgctgctggccattgcggatgcgctggacgagcatgccgccgatatcgaggccgccaatgcgctggacatgcttgaatccaaggaaaacggcatggacgcgggcaagctcgatcgcctgcttttcgatacgccgcgtgtggccgccgcagcccaaggcgtgcgccatgtggcaacgttgcccgatccggttggtgaaatcgtgcgtggttataacctgcctaacggattgcgtctcacccaaacgcgagtgcccatgggtgtcatcggcatgatttacgaagctcgccccaacgtcactgttgacgtggccagcctgtgcctgaagtccggtaatgctgcgctgctgcgaggtgggcatgccgccgaacataccaatgccgccaccttgagcgctatcgccccagtgctggaagctcacggttttgatccggctctggtgcagtccgtcgaccagtacggccgtgccggcgccaccgccatgatggaggcccgtggccatatcgatgtgttggtgccgcgcggcggtgcggggcttatccaagccgtggtgcgcaattccaaggtgccggttattgagactggtgccggcaacgttcatatctatatcgacaggtccgcagacctcgtcaaggccattccgattgtgttgaacgccaaaacccagcgtgtgggagtgtgcaatgcggccgagaaactgctggtgcatgaggacgtcgccgctgaattcctgcctcagatcgccgcagcgttgacgcaggcgaacgtcgtgctgcaagcggatgaaacttcgtacgacatcctcgaaggcgccgccattgaagggcttgaactgaatcaagccaccgaggaggactgggataccgaatacctggcgctcaagatgggtattaaggtggtgccagacctagaagcggctatcgaccatatcaacactcattccaccggtcacaccgaatccatcattgccgaggactatgcggccatcgaggaattcaccaagcgcatcgactcggccgtggtcatggtcaacgcctccacccgtttcactgatggcggtgtgttcggattcggcgccgagctcggcatctccacccaaaagatgcacgcgcgcggacctatgggcttgagggaaatgaccaccacgaagtggattggctacggaacggggcaggtgcgcgcatgagcgagaatgtgaagagcgaggacaacgccgcagttgagctacggccggatattgatctcaacgattccaaactcaatctcaagattgcggctgagcgcctgagcattgtgcgctacgtgtttctcgtgcagattgaggatggcatcgcttcggcggcgcagcgagcgtcgctcgagtacgcggatgcagtgcttatcggttggccggagaatgaatcgccggagattgcggatttgactgactcccagctcaaaaccgtgcgtgagcatatggaactgatggaaagttacatcgccaaatacacgcagatggagcatgatggcgatatcgatggcatgacggacacgttgattcgcatcaccgaacgcgtggccgaggtccgtcgactgtatcagccggacttccctctgcctacgttcgctgagattcgccgtgtggtgcaggatgagtgggacgaagacatgggtaagatcgatcccaaggaagacaatcccaccgctaatgaaatcgagcaggaaaccgaaagcgccaacgaaggcggcgaaggcggcaaggcatgagcagcagcgatccggctgaaatcattgctgtcgcacagggcgaagccgaacggcgtatgtctgatctgtctgtgccgggcggcgcgaatagccatggcaaaggtcgcctttccgcgcgcggcaattggcacactcgtctgcgcatcggcattatgggcggcacattcgacccgattcacaacggccacttggtcgcggcgtccgaagtcgcatgggtgtacgaccttgatgaagtgattttcgtgcccacgggtcggcctgtattcaagcttgataaggaagtcaccaacgccgaggaccgctatctgatgacggtgattgccacggcatccaaccccaagttcaccgtgtcccgcgtggatatcgaccgtccaggtgtcacctacaccatcgatacgcttaaagacattcgagcccagcatcccgatgcagagttgttcttcatcaccggtgctgatgccgtggctgagatcatgcagtggaaggacgccgacttgatgtgggatcttgcccacttcgtggccgtcacgcgccccggatattccagcccggatggcgtcacgctgcccgaaggtaaggtcgataccctggaaataccggctttggccatctcctcaaccgatgtgcgccgtcgtgccgagcacgacgaaccggtctggtatctggtcccggatggcgtggtgcagtacatcggcaagcatggcctgtattccaagcagcactgacggcaaccgtaacggattatttaagccaaccccatcttgattttcaacgtcatcacacgaatcgccgactgagtgaccttattggcgaaggcgggatctgatgccgcccgcgtagacaatccatccggaatcggcgcgacatagttggtgtctccgatgcaggccaaatcgccgccggcttccacgagtttgactcccaattgagtggtgtcataggcgctcacagccgctgccgacatcgaatccgaaatcactacgccgtcatatcccagatcgccgcgaagatgcccgtcaatgatgattgaggaaaacactgcgggatcattggggtcaatggtctgataggtggccaatgccatcatcaccatggcagggtcagcctgatcgatggtggtgtcaaacgccttgatttccgtgccatccaaggtggtggtcgtatctaggatgtcgtcggtggtgaaatccgtgttgccggtcactgcgcccaatcccggataatgtttgatggcggactgtactccggcattggccatgccctgcacaaacgctgtgccatgagctgcgttgcctgccgcgtccagtccgaaatcgcgatagagcgcaccaatgggggcgttggcggcccgattcaccactaccgtgcccagcacgggtgcaagatcgacgttaatgccggcggctgccagctgtgagccccatacgctggccgattgacgcaactgattggtcgacatggttccctgatccactgccgtgggcatccgatcaaaaccagggccggtcagatgctgtactcagcctccctcttgatcggtggagataatcaggcggttatcaccggggcatacccctgcaactggtcgtccgcagcccgcaccgaagcaacccctccggtccatttgccgatgatgagcaccgatcccacatggcggtcggcgatgagtgaagccagtgaggccgggtcgttgccggcatacagcggtgccatcaccaactgaccaattcgagtgtccatatccatggcattgaccatgcgatgagctttgctggcaggggagggatccggcttgggggccgccgaacgtgccaactgctgcggagtgttccgtgcagcgtctgctgtagcggaacttgccgcggcatcatttccagtcatcgatgcaaaccagccgatgcgccatccatacagcgccgtgactaccagcgctagtacgcacaatacggatccgaccacacgccccaatgcgaagtcctatggccatcccgatagggacgtgccgacggttgctcaggacgattgctcataatcttccagcataggggaatctcatacagcttgctggcaatccgctggcagtatgtgttcagggtttgtgaggaacccgccaagctgaatacaagccgaaatccagtgcgctgtgctcagggcataacctactttcccgacctttcgctacgcttgaatcatgtcttttaatgaccctttctcaatactgttcggcaatggcggcggttcccggcgcaataactcgaatgatgatgatccgatcattcttaatgttgaggccgatggagacacccccaacaggaatggctccaacccctcagggcgaggtccggccggtccgcgcttgccccgcagaccctccggcagccatggcaacagccgaggcaccaaaatattcatcggcgtggtgctggcactggtcatcatcgtcgcactgttcttcggtctgtcccgattcatcaccgatctgatgtggtacggacagctcggcttccaatctgtggtgtggacccaactcggcgtgaaaatcggtctatgggtggcatacgcattgctgatggccttgactggttttatcgccgcatggctggccattcgcgctcgcccggactccgcggatggctccacgattcgcatcaatggtgatgtggtggaagtcggcaaatcggcgagctccaagaccgcacgtcgcgtggccgtggtgatttcgctgattgtcggcgtgattttcggctcccagttcaacgcgaactggagcgagatcctgcttatgttcaacgcgcagaagttcggtaccacagacccgcagttcggactcgacaacggcttctacgtgttcgtgctgcctggcctgaagctcgtgctcgcagccgtggccatgctgctgggcgtaggcctcgtgttctcattggtcacgcatgtgctgatgggcggcatccgcatcaccatgccggtcaacggtcgtggcctgttctccatcaccaagcgcgctcgccgtcagctcggcatctggctgattcttaacatgcttgcgtggtccgtacgtcaggtgctgggtgttttcgaacagctcaccgtgcagggctcgcgtatcactggcgcttcctacaccgcagtgcatgccaacattcccgtcaccttcatcatggccgcattgaccgccatccttggcgtggtgctgggcgtatggctgatgcagtcccatgcgcttgaaggccaggcgtccatcggtgtgcgtgcctctgctgctctcaaggcctggcgcgtgccggtaactgccatcgccgtcaccgtggtggtcggcatggtgctcaccatcgcttggcccatgctgctgcaacgtttccgcgtcaacccgaatgcgcaggagatggaatccacctatatccagcgcaacatcgacgccactcgcgccgcttacggtctcgacaagctcaaaaccgagcagtacaaggtgaccgacaagggcgagcaaggtgcactggccaaggaggccgacaccaccgcgcagattcgtctgctcgacccgcaggtcgtcagccccacgttcaagcagctgcagcagtccaagcagtactacaccttcgccgacacgcttgccgtcgataagtatgagattgatggcgtctcccaagacaccgtgatcgccgcgcgtgagcttgacctggctggcaacgacaaccgcaactgggtcaacgaccacaccgtgtacacccatggttatggcgtggtggccgcttacggcaacaaggtgactgccgacggccagcccgaattctttgaatcgggcatccccacccaaggcaagctcaccgagtccgaaaagtacgagccacgcatctacttctcgccgaacaccaccgaatactcgattgtcggcgcacctgaaggcacgcaggcttgggaattcgattacccgaccggttccgaaggcgctttgaccacgttcaagggcgatggcggaccgtcggtcggcaacctgttctcccggattctctatgcaatccgcttcggttcggaccagattctgttctccgaccgtgtgaccagcgaatcccagattctctacgaccgttccccgaaggaacgtgtggccaaggtcgcgccgtacctgacacttgacggtcgcgtgtatccagccgtggtcgatggccgcgtcaagtgggtcgtcgatggctacaccacctccgacgcctacccgtattcgcagatgaccgatctcggcaatgccaccaaggactccaccacggtgtcttcgtcgacggtgtccagcctgggttcgcagcaggccaactatatccgtaattcggtcaaggccactgttgacgcatacgacggttccgtggacctgtatgtgtgggatcaatccgacccggtgatcaaggcgtgggagaagatcttccccggccagtatcaccagttgtccgaaatctccagtgacctgatgagtcacctgcgttacccggaaagcctgttcaaggtgcagcgtgagttgctctccaagtaccatgtgacttccgccaaccagtactactcgggcgaggacttctggcagacaccggtcgaccccaccgaatcacagtcccagcaggatcaggacatcctgcagccgccctactacctgaccttgcagaccggtggcaccaaggagccggtgttctcgctgacctccacctatattccggccggccagtccactcgagagattctgaccggattcctttcggtcgactccgacgccggtaatgagaaaggcaagataggaccgaattacggcaccatccgattgcaggagctgcccaaggattcgaatgtgccgggccccggccaggcgcagaacaatttcaacgccaatgccgatgtgtccaaggaactgaacttgttgcagtccggtgacacgcaggtggtgcgaggcaacctgctcaccctgccgctcggtggtggcttggtgtacgtgcagcccgtgtacgtcaagtcttcgggtgccacgtcgttcccgctgctgaagaagacgctggtggcattcggcgatcaggtcggctttgccgacacgcttgatgaggcgctcgatcaggtgttcggtggtgactccggtgcagcggccggcgatgccgagaatgtgtctggcgacggatcatccgactcctcgaacaccggcggacaggatgccagcaatcagtccggttccgacacctccggcgaccagtcccagtctgatggccagtccggcaccacggacggcaagtcggattctggcacgtcatccgggcagtccggcaccgctcgcagtcccgaactccagcaggcattgaacgatgccgcccaagccatgaaagacagccagtccgccatgaagaacggcgattggaccgcctacggcaaggcccaacagcagctcgaagaagccctcaacaaggccgtagagctcgacaagtagttcaccgaaacaaggtggctcccgctggcgggagctgtcagcgcagctgactgagggtggtcaagagtgactaatgctatcaccctcagtcgcggataaaccgcgacagctcccgccagcgggagccatgctattgtctggagtcatgccatacactttccgtccagccgtcgagtctgatatccaagccatcaccgacatctacaacgcctcggtggtggtcggcggagccaccgcggacctgactccgcgcaccctcgaccagcgccgtgcgtgggtcgaatcccataaacctccatatggcgtattcgtggcggaatcagagggcgggcaagtcatcggctttggttcgctctccgtgttctacgatcgtgccggctatgacggcgtcaccgatctcgcctactacatcgcccccgcatggcaaggcaggggagtgggcacgttcatgctggacaatctcctacgcgaggcccgcgcccgtcacatgcgcaaagcctgcggcatcatctttgccgacaacgccggctcaatcgccctcatgcgacgattcggcttcacccagttcggcctcatgcccgccgccgccaccgactccaccggcaccatgcgtgatatgtcctactggtatctcgacctctaagtacaatcgttgcgtttgtaggctggcgagacaagacgaggaacggatatggcatcggatttttggctgattgcgggactgggcaacccgggcaagaaatatgaggacacgcgacacaacatgggcttcatgacagccgacgtgctcgccgaacgctggagcgtgaacttcgccgatcacaagggtcttgccatgctcggtaagagcacgatgaatcttgacggtcgcaccatcaagttctttctggccaagccgttgacctacatgaacgactcgggcaatgccgtggcctccatcagcgcctactatcagatcgagcccgaccacatcgtggtgattcacgacgacatggacttggaattcggacgtatcaaggtcaaggcgggtggctccgcaggcggtcacaacggcatcaaatccatcgatcgttcactcggcacaccgaaatacgcccgcgtacgcatgggtgtcggccactccaagcgcggagcgcacgcgcatgacaacacggtgaactgggtattgggcggctttggaccagatcagcgcaagcaactgcccgaattcctggctgatggtgccgatgccgccgaaggaatcatcttccatggtcttgccaagacccaggagaagttcaatggccgctaaggcgaaaacttccgacacgcagtcttcccgtggacaagcggcagacagccgggccgtgcatccagatctgatcaacggcacgcttgccggcatactgtccgaacttgagcgggacaagacattcctgagcctcgccgcaggcgacatcgaagcttcggacgacgtcgacaattccattctggccggtgtgcctgagggtcttcgcccggcactggccgcggccattgctcagggcacgaacggcaactcaggcaagccggtggtgttggtcgtggcttccggccgcgaagccgaggaaaccgtgggatcgctgcgctcctggtatgacggcgacccgaacgatatcgcccagctcgaggcgtgggaaaccctgcctcacgagcgcctgagcccgcgcgcggacaccgtggccagccgtatggccgtgttccgcagactgaagcacccgagtgaccgccaatccgatgttcgggccgattcgcatccttgtcatgccgattcgctcgctgattcagccggtggtccaaggccttggcgacgtcgaaccactcgtattcacggtaggggaggatctgccgcttgacgaggcggccaagcgactcatcgaaaatgcctacacgcgcgtggaactggtcatggatcgcggcgaattcgccgtgcgtggtggcattctcgacgtgttcccacccaccgcgccgcacccggtgcgtatcgaattcttcggtgacgaaatcgacactatcaaggaattccacgcttccgaccagcgcacctatggcgaggggctcaaaaccatctgggccaccgcttgccgcgaactgcaattgactgatgccgtgcgcacccgtgccaaggccctgatcggttcgattcccaacgccgaagacatgctcgaatccatcgccaacgccattccggtcgaaggtatggaatctctgatgcccgcgcttgtggatcacttggaaccggtgggctccatgctgcccaagcatgctgtggtgctgcttagcgaccctgaaaaactacgccgttccgctgaagatctggccaaaaccgccaacgagttcttggccgccagctggcatgtggccgcatccggccacggcgccggcgcgcccatcagcttcgacgaagccagtttccttgactatgcggagaccgtcagttcgcttgaatattcagagcatccggtagttcgtctcaccagtttcggtgtggacaccacactggccggccatgtgcagctcgacgcgcagaatccagcggaattccgaggagacgaggctaaagcttcgcagggcattgacggtctgttggaagccgggttccatgtcactatcaccgccgctgctgccggcaccctggcccgtctgaagcgtgcactcaacaccaccggcatcaccacgttcgatgccatccgttcccaggccgttgacggattcgtgggcaaggccgccaaaatcgccctgctcaccgaacgcgacttgaccggtcgaagctctgcggttgctgtggccaaaacgccgaagcgtcggcgtaaggccatcgatttggtggaactcaaaaaaggcgattacgtggtgcatgagcagcacggcatcggccgattcgtggaaatgcgccagcgcaccattggcaccggcgccaacaagaccacccgtgaatacctggtcatcgaatacgcgccttccaagcgtggtgcaccggcggacaagctgttcatccccaccgatcagcttgatcaggtcagcaaatacatcggtgccgaggcccccaagctcaacaaactcggcggctccgactgggcggccaccaaggccaaggcccgcaagcacgtccatgagattgccgaagacctgattaagctctactccgcccgccagcgtgccaaaggttttgcgttcagcccggacactccatggcaaaaggagctggaggacgccttcccctatcaggaaaccgccgaccagctcaccaccatcgacgaggtcaagtccgacatggaaaagcccgtgccaatggaccgtcttatctgcggtgatgtgggcttcggcaaaaccgaaatcgccgtacgtgccgcattcaaagccgtacaggacggcaagcaggtggcggtgctcgtgcccaccactttgctcgttcaacagcatcaggaaaccttcaccgaccgctttgaaggattcccggtgaatgtggccgccatgagccgcttccaaaccaccaaggagatcaacgcgaccatcgaaggcctggaaaacggcatggtggacgtggtcatcggcacacacaaactgctgaacccgaaaatcaagttcaaggatttgggactcgtcatcatcgacgaggagcagcgtttcggcgtggaacacaaggaaacgctgaaagccctgcgcaccaacgtggacgtgctgtccctgtccgccacgcctattccgcgtacgttggaaatggccgtgaccggcattcgtgagatgtccacgctcgccacaccgccagaagaccgtctgccggtgctgacctatgtgggtgcctatgaggacgcgcaggtcaccgcggccgtgcgccgagaactgctgcgcggcggccaggtgttctatgtccacaatcgtgtgcaggacatctcgtccatcgctgacaagattcacacgctggtacctgaggcgcgcgtcggcatcgcccacggcaagatgggggagaagcagctcgaccagatcatccgcgacttctggcatcgcgacatcgacgtgctcgtgtgcaccacgatcatcgaaaccggtctcgatatctccaatgcgaacacgctgatcgtggaccatgccgaccgtttcggtctgagccagcttcatcagttgcgtggccgtgtgggccgtggccgcgagcgtgcgtacgcctacttcctgtatgacccgtccaagccgatgaccgagcagtcgcacgaccgactcgccaccattgcgcagaacacggcgctcggctccggtttcgacgtggccatgaaggatctggaactgcgcggcaccggcaacctgctgggtgacgagcagtccggccatatcgaaggcgtgggcttcgacctgtatgtgcgcatggtctccgaagccgttgaaaaatacaaggaacccgatgaggacgtcgagccggtgtccgtgtccatcgatctgcctatcgaggcctcgattccgattgactacatcgattccgacaagctgcgtttggaggcataccgcaagctcgcttccgcacgcaatgaagccgacctcaaggatttgaaagaagaactcaccgaccgttacggcaagcctccggtcgaattcgaaaccctcttcgacgtggctcgcttgaagttcaaggcgcgcaagctcggcgtttcggagattctggcgcaatccaaccgcgtgcgtatcggacgcattgacccgcccgaatccattcagatgcgcatgacgagaatctacaagggcacccaataccgcccggtcactcaccagctcatcatccccaccccgttcaccggctccctgggccaaggtcccatgagttccgatcaagtagttctttggaccaatcagctcctcgatgacttggcatggaggccacaacgatgaaaaaccaacacacggcaacacttgccggctacgaaattcctcgactcggcatgggcacgatggcgctcgccatcgaggggcggccgaccaatcgtaatcaggcgatcgagaccatccatgccgcgctggatgccggggtccgttactttgacacggcgtggtcctattacctgcccagcaagccaggaaccggcgagccggaggacatgggatatggcgaatacttggttcgtgacgcgttgaactcgtggcacggcccgaaggacgaggtgctcgtggccaccaaaaccggctggttgcgcacgctcgacaaccatggaaactatagctggcaggccgatgcccgccctgaaaccatgattgccaacgccaaggaatccgcacggcgcctcggtgtagaaacgctcgatctgctgtactcgcattgcaacgatccgcaggtgccctacgaggaccagatgggtgcgctcaagcagctcgtggatgagggcgtggtcagagcggtcggcatctcgcgcatcgacaacaaggacatcgaaattgcccataccattctgggagacaggctggtcgccgtccaaaaccagttctcgccggtccaccgcgatcccgaccacacgatggaaacctgcgaacagcttggactggctttcgtctgctggtcgccgcttggtggcttcctcgatcccttcaatgagcatctgttcgaccgattcaaggaagtcgccgacaatcacggctgctcctaccagcgtgtcacgcttgcttgggagcttgcacaatatggcaatctgtttacgattccctccgctagaaacccacaggagattcaggactcgttcaaagcggtcactcttgaattgtccgatagcgaaatcgactatctcaatgatgtaatcagcgcctaagcgttttcctccaaagttgactgcaatcacgcggcacaccgacattgtgagcgctcacatcaaattttgggcgtgttgttcacaacgtccacaaatcgcactactcttatgaatgtcattcaagatacacaaccgttttaaggagtagttgtggcagcaattgaaagcgtgtacgcacgtcagattctggattctcgtggcaacccgaccgttgaggtctacctggagaccgaagacggtgctcagggcaagggtctggttccctctggtgcttccaccggtgaggccgaggcttgggagcgtcgcgatggcgacaagtccgtctacggcggcaagggtgttctcaacgcggtcaaggccgtgaacgaggtcatcgctccgaagatcatcggcatggatgccgctgatcagcgcgccctcgacgacctgatgatcgagctcgacggcaccccgaacaagggcaagctgggcgccaacgccatcctcggcgtttccctggccgctctgtacgcctccgctgagtccgcaggcctgccgctgtatcgctacatcggcggcaccaacggccacatcctgccggtcccgaacatgaacatcatgaacggtggcgctcacgctgacttcgccaccgacattcaggagtacatgatttccccgtacggcttcgacacctactccgaggctctgcgtgccggcgttgaagtctaccacaccctgaagaacgtcctgaagaaggaaggcctgaacaccggcctcggcgacgagggcggcttcgccccgaagatgaagtccaacgaggactccctcaagtacattatggacgccatctccgctgccggctacgagcccggcaagcagatcggcatctgcctggatgtcgcctcctccgagttctacaacaaggagaccggcaagtaccgcttcgacggtgaagagcgcgactccgcctacatgctcgactactacgagaacctcatcaacgagtacccgatcgtctccatcgaggacccgttcaacgaggaaggctgggaagactgggctgccattaccgctcgcctcggcgatcgtctgcagttcgtcggcgacgacctgctggtcaccaacccggctcgtctgcagaaggccatcgacctcggcgccgccaactccctgctggtcaagctgaaccagatcggttccgtcaccgagaccctcgacgccatcgagctggccaccgccaacggctacacctccatggtttcccaccgctccggcgagaccccggacaccaccatctccgacctggctgtcgctaagaacacccgccagatcaagaccggtgccccggcccgtggcgagcgcgttgccaagtacaaccgcctgctcgagatcgaggaggagctcggctccaccgctcagtacgccggctacagcgctttcaaggcctgcaagaagtacctggccaagtgaattgaaacgcccgtaaaggcgtgatattcagcgcaagcttgatgcccgtcgcattcgtcaagtcgaatgcgacgggtattttcgtgtgtcatgagcaagtcgttccgcaccggcaagtccggtaaatctggcaaagtcggtaaacccggcaaagcaacggccagaaagaaaaacagtgcgggaccaatcgcatttttcgtttccctgtttatcgtggctcttggcaccattcaattggtttccacgtttcacacctatgcgctgaaccttgccgaactcaatggcctcaaacgagaggaagcctcgttggtggccaaaaaacaggaattggaaaacgatatcaaacgttgggatgacaaagcctacgtcaccgcccaagctcgtgagcgtctcggctttgtgtttcccggggagaccgcagttcatgtgcttcatccggaagccgtgaccggtagcgaggattccgagtctgattcgtcctcgtcctcggaatccaacaagaaagtgctgccatggtacagcgagctcgcctactcgttcaagaaagccgacgagcctgtgtctcaatcaaaagatgacagctcgggcggctctgattccggcaatacgcaggatgaacagaacaacacgcaagacagcaatcagaccaacacaggggagggaacccagcagtgaccatcgatatcgacgccaaggccaaggctctcgttgacgcgattcttgccgaacccgcgaccgaccatgacatcgatgtggtgcaacgccagcttggacgctatccgcgcggcatggttgctgtgggtgcccgatgcgtatgcgggcgtccgctcgccgtcatcacccggcccgtgctgcccggcggcataccattccccaccacctgctacctgacggggcctgaggcggtcaaggccgcctcccacgtggaagcggccggcatcatgcagcaatacaacgacatgctgggcgccgacgaggaactgcaggccgcctataggcaggcacatgaactgtatctggccttccgccatgaactggcaacccgtttggacgacagcgaggagcacattgaggggacctcggccggcggcatgcctgtacgtgtcaaatgcctgcatgcgctactggcccaatcgctggtcatggggccgggagccaatccaatcggagacatggtactcgaacgaatcaaggatgagttcgaccccgccctctgtcgctgctcgctggaggactgagcaacgattccgcgcatggcacgtgtgccattgtccgtacaagaagaagaggaaagcgatgagcaaggaatccgtaaccgttgccggtattgattgcggcacgaactccatccgattgaaagtcgcgcgcgtggacgccgacggcatgcatgaagtcgtaccccgcatcctgcgggtaatccgactcggtcaggacgtggacaaaacccatcgttttgccgacgaagcattggaacgcgcgtatgaagccgcccgtgagttcgccggcgtactcgccgagcatccggtcgacggcctgcgattcgtggccacctctgccacgcgcgatgccgagaatcgtgaggaatttgaggatggcatcgagagcatccttggtgtccgtcctgaagtcattcccggtaccgaagaagccgatctcagcttcttgggtgccacttccgtagtcaaccgagatgatttgccggcaccctatctggtggttgatttgggaggcggctccactgaactggtgatcggcggtgatggcgtgaacgcccccaccacacaggtgcagggtgcattttccatgaatatcggatccgtgcgcatgaccgaacgccatctcgtcaccgatcctcccacacaagcggagattgatgaggcgatagccgatatcgacgagcatatcgatgaggcgttccgtactgtggacgctggcaaggcgcgtaccatcatcggcgtgtccggtacggtgaccaccatgaccgccctggccatgggattgaaggaatacgatcacaccgtggtcgatggccatcgactgaaccttgaagatgcgtacgcagtggatgaccgattcctgcgcatgacccgagccgaacgcagcgcatacaagaccattcatccgggccgtatcgatgtggtcggtggtggcgctgtggtctggagccgcgtgctcgccaaagtgagcgaggcggcccaagccgatcacggcgaggccatcgactcgttcgtcgcgagtgaacatggtctgctggatggcattgtgctcgattatgggcgccgtcttcttgctcggtagcgtacaataactaagccggtgaaaatccggcaggcctccatggcgaaattggtatacgcagtcgacttaaaatcgaccgcttcggcttacgggttcgagtcccgttggaggcaccctcgctagacggggatggtgccgttttgttggactcgtcattgattccatcaccaccgatcatgccacaagactgagtctgcgtcgacggtccatgatgcccgtgtccggactccgtcttgatcctcttgtcccggtaccggaccatgtagtcgtcgagcatgttgatgaacccgtccatcgagacgcccgcgaagctgcgcttgtggaagaactcctgcctgagacggccgaggaacccctccgcggcggcgttgtccggactgcatcccttcgcgtccgtcgaacgcgtcaggtcgtcgtccttgcggatgcggatccacccgggccaccggtagtggcagccatggtcggaatggatgattggtttctccccgtccttgagcgtggagcacgcgtcggcgagcatgccgttggccaatgccgagtccgggctggtgccgatcgtccacgcgaccggcatgccgtcatggcagtcgatcacgggcgacgggcagcggggatcgagaactcggtcaggtccgtgacccacggcatgttcggacgctcggcgtggaaatccccgtccgccaggttcgcaggggccttggtcagctcgcccttgtacgagccgtgccgcttcgcgctcctggacaggggggcaccaggccgtgcctggtcatgagccccatgatctgcttcgcgctggccacgattcccatgcccctcagctccaggtggacccgcttgtacccgtacctgcgcttgctgttctcgaacgcctcgcgcacgagctccagtagaccggagtccttgtcggggcgtttcatggcgtcgggctggtagtggtacgtgccgcgcgcgacgcccaccacgggcaacaggcttccggcggtcacgccgagcttctcactggtctgtttgacgaggagcgtcttctcgtggccggccgggttttccgggtctgtgcctggctcttttcccaacagctccaacgtgcccttccggatcgcgatctcgatgtccggctccttcttctcccgccgctgccgttcgacatcggcgtccagttcgtccagacgggcctgcaagcgcgcgagtctggcctccatggacccagcgtgtccaccggatccgccgtgtcccgaggcccggatgcggacgtcggcatgtttcccgacgccatagtcgccacgccggctttcctctccccggccgtcgggggcttcctcctgggcgtctccgccacgggtgcgctcctcctcgagccggtccgcgtaccacgacagcaacgcgcccttgccgggatggccgagctcgcggatcacgtcggcggcgcagcgctcgtatctgacgtacaggtccacggccctgccgcgctgctccctgccgtaccttgccataaggggggggttctcctcccggtcggggagtccaagaaaacgtcaccacctcgaacccaaaacaccgacttgactaaatacacatctacgacaccagcgcgaacaggaccgaggccgaaacggggctcaaacgcctgtgctcgtggatgatgcaatcgaggctggagcccatgaaggccctcgcccgacagctccgccgccattgggacgacatcctggcctacttcgaccaccggcgcaccaacgcggtcctcaagggcctgaacagcatcatccagaacgtcaagacccgcgcgaggggcttcaggaacatggactatttcagcacgatgatctacctgacctgcggcagactcgacctgcgaaccgtcgccacctgacccgctttacccacaccaaacagcgaaaggccaggaatacttagaaaatctaaggaaacctcaccatccgagctgagacaggagaagaagagatgcaccgctgcaacgactattagcaagcataatcggactagccttaattgcggggacagccgcctgtgagggaagccaagtaaaggaaacaacagaagccatctcctctattggcaaagtatccctctcctctaaaaaggcaattgcgctagcaagacagaaatacgacaccctatccagcgaagacaagcagaaggtcagcaatgccggcaccttgaaaaaggctagccgaagatatgaaggacttatcaaggagcagagatgcgtcaaaaatctgattgatgccttcgacaagaaaaattccgtaatggaggaaacaaccggttccgcacaaaactgggccaagcggacactgcaggcagtttccgacgaaaaagaaaccctttcaaatcacgatgcttccgaattcgtagacgcctcgttcagggaatttctcaaatcttacgattcttccctacagtcgcagcaagacggtcttggccgttaccctgacgacgcagatgcctataacagcaaatttatcgattccgggttgaagatacagaacaagctgataacagaagaagccaaggagtacgcgctcgtaacgctagagcagacaagccaacaatttctagggaaaatggattccttgagcaaagccgtgaaaattgatacatccaagggccaagtggaagtcaccgtcgaaggtttcgcaattcgtccagaagacacggtcgctttgcagcagttcggagaagccggcgacgatcaagaatgcggatacctcctgttgatcgtcaaaaatatttctcatcccgtgtctgatgactattcaggtcatataagattcgacgaaatcggaaccatttcagacgaagaaggcgttcagcgcacaagttccgactcatctttgaaatatccgggatatgagtgcggtggcggcgcggcattcggcgtatacccggaatccgacgtacaaatcggtgagacgaaacgtataagcatcccttatgtcgtgaacaaatccaccaacactgttcgagtccaaatgaatgatgattcgttcctcattcttccagtaggaagatagacaataggccagtcctctcgctcggggatcggccttacaactctaagcaaaagttttctgctggttcttcgatgccctgtcagctgaaattggcatcaatgcattagtcctcgtcgaagatgacagtgaataatgccgatggcatattgttgattaaattattcggcactcttggaataaagctctcatcaattcaaacaacggtagatggtggatcgtccgacgcccatcatcgcggcaatctggtccaccgtcaccgtcttggatttgtacagacgccgcacctctttgacctgcttctcgtcaagtttggcgggtcatccgcccttccgcccgcgggcacgagcggcctcgagtccggggcgcgtgcgttctcggattaaatcacgttcgaactgcgcgagactgccgaagatgttgaatacgagcgtgcctcctggagtgctcgtatcgatcgactcggtcagggatctgaactgcattcccctctcgtcgaacgtggtcatcaggtcgaccaggttctgcatgctccttccgagacggtccagcttccacaccacgaccatgtcgccctcgcgcaggaggtcgagcatgtggtcaagctctgtgttttgatgctcctatacattgtcaagcgtttgggtgtgttgttttgggttggttgtcgagtgtatccactggatggcccgttgctcgagttcgggaaggtcgcgtgcgccgcgttcgatctcgctgatgcggctcgagggcacgcagagcgcctcgccgatctgttgctgggtgatgttccggctgacgcgtagttcgcgcagcttggcgccgcgttcggccggggtcccgcgtccgacctcgccgttgcgtatgctgatgagcgcccggtatgcctcgcgggcgatgaaccgtttgacgcagcggatgatctcgagcttgcctttgccctcgcgggtctttttggccatgtagtcgcgggtcggcttgtggtatcgcaggcggacgatggcgatgcggtgcaatgccatattgccctgccggttgccgcctttgttgagcctgtgtcggttggtcctgccgctggacgcggggatggggcagacgccgcagagtttggcgaacgcggcctcgcttcggatgcgttcggggttgtccccggcgacgatggccagggtcgcggcgatgacggcgcccgcgcagtacatgtcgagcagcggcctggcgtgttcctcgaggatcaggcgcatgcgttcctccaggagaccggcctgccgtttgagcgccttccatgccttggcggcggatttcagcgcggccagcacgctccgctcgaccaggccgccggccggtctgcattcggcgagcctgttcatgcgggtctcgctcctcaacccccggtaacgttccctgatgggttccggggcggtgacgagcagcccgttcgtcgaattggagatcgcggtcatcgccgacaccagttgggatcgctgcgcgttgaggtggcgcagtgcctcgacccagccgtccgagcttttcggcaggctcgtgccgtcgccggccatgacgctacgggcagcggcgaccgcgtcgaggggatcggacttgccgtccctgcggcgcacgcttcgcctggggcgcagcacctcgcgcacctcgtatccggcggcagtgagacgacgggccagggccgctccgaacgagttcgtgccctccacgcccacggccgcgaccctgcccggcccgggcagcatgccgatcagcctgtcgtatccgtccgggtccgccgtgaacgtctcggcgcccagcggcctgccccgctcgtcgagcaatgcgatggtgtgcgtgtccgtgtgggtgtcgatcccggcccacaccacttcgttcggcggcgtcatcgtcgtcgttcctttccatgtgttcggatgcctcccgggggcttgcggcgcagacaggacgttgacggggcacgctaccatggttcttgcgggatccgacgggagcggccacgctcctatgaggtcatgcatccatggcccacgggtcggcggccatgggcgggacaaatcaaaataaggacagccaccggaaccgatggcgtcagtcaaatgtggggtcaccgcccaagccgtcatccaccattatcaccgatcagaaaccggcataaccattatcaacgtcaaatttttgtgggccgtttcggcgtttcttttagtccgtttgagcggttgtttttaggccgtttcggctttggccagtcctgtgggttgtcggttattgcatgagggcgtgggtcttgcgccaggactcgccctcgaatctgatcatcctgccgtggtggacggtgcggtcgatgatcgcggcggccatgttggggtcgccgaagatcctgccccatccggagaactcgatgttggtggtgtagatgatgctctgggtctcgtacgcgttggtgacgacctggaacaggagcctgctgccttcctcgtcgatgggcacgtagccgagttcgtcgatgatcaggagcggggttctgccgatcatggcgagttcccggtcgagccgattgtccgtctgggcgcgtaggagccgcatgaccaggcttgcggccgtgtggtagcgcacgggcatgcccctgcggcatgcgttcctgccaagcgcgatggcgaggtgggtcttgccggtgccgggaggcccgaacaggacgaggtcctcgtggccgctgatgaattccagggattcgatccgctgtcttccgtagtcgacggggaagcggatcggggtccagtcgtagccgtcgagttccttgtcggcggggaatccggcctgtttcaggagccgggagcgtttggagcgttcccgggattcgagttcggcattcatccattcctccacgaactccatctgggttggcgtggcgttggcgagctggtcggcgaggatctggcgggtcaggggcaaccggcgcgcgaggttcatgatcgtttcgatcttctcgccggtggacgcgcggcggcgtttcatgtcgggcatgacgaccggtgggcggtggatccccatgtttacgcctccttcctttcccgcgtcccacgaggctgcatgaacacgtcgtatccggtcaggtcgggtgcggtctgctcgtatggcttctcgccggaggcgatgcgccgtgccatggtggtcaggctcgcctcgtcgagcgggtgcccctgttcgaccagatgctcaccagcctcgacggccggctcgaacccgcacgcgtcgctcgttctggagatgagccggaacgcgttcctgcgcgccttggcgtccatccggtcgatcgccagacgcagtttgtcgggaaaatcatcgcggatggtggaatcgggccatgcgttggtcttgcggcccagtgcgggcaggagcgtggcggggtcgcggatagtggcaggcgaatccccgtacacgcgcggcagcctggcgcaggtgcgcccgtcctgggtgcggatcgtcacgtcgaacgcgcgaagggcgacgtccaacgtccagccgcgccacgagggtccggcgaggtaatggttgccgtcgacctgcacgcgcccgtccttgtcggccttcctgacctcccagcggatcgcgtcgtagggcttggacggcaggggctgcatctccgccttctcctcggcgaacagtccgccgatcggcgcgcccttgcggtaatgcgtctccttggccatcgcgtcgcaccgctccagcatgtaccgggtcaactgggcgtaggactccgcgttgagcaggggcaccatgatgttgcggcgcaggaacccgaccgcgttctccacgctgcccttctcattgcccgagttcggattgcagaacctggtctccagccggtaatgctccacgaacagttcgaacaccttgacgatgctgaccctgtcccacgcgacccggtgaccggcgccggtggcgttgtcgagcaccagcgtcagggggaccgcgcctatgtgctcgaacaccgtgcgcagtcccgcgcacacgcattccgcgttctccccgggcagggccacgcagtagcgcatgttcgaatacgggaacgtcacgaccaggcaatgcacgtcgacccggtccccgccgaccacggcccgcgccatgccgaaatcgacctgcgcctcgcccggatgccactcgagctccagatacccgtccgacgggagccgatgctcctcgcgccaacgcttcacataccgttgcaccgacgagtacgcgcccccgtagcccctctccgaaacgagccggtcgtacacgcgcttggcggtgtgccgctgcttgcgcggcatgaaccggtccgcctccaaccacccgtcgaccgtcgccttgaacgggtcgagcttcgacggcctcgatgcggagtgctccggcttgggagagcaatcctccctcccggcgtatttcgcgaccgtgtcgcgggccacgcccacctcttttgcgatgcttctccatgacacgccatgcgcgtcaagcaccctgatacgttgttgtacggacaccggtaccgtcattcctttcctttcccgagaaaccgaatggtttgcttccgactcgggaaactagtacgggcaggacgggccggtgttcatttctcgccacacgctgaaatggactaaaacctgccgctcatctggagactttccacacgctcacacggcccactttctattgaacagacacaaagctcaggacgatgggccttcgcgccggaggccacgtcggtgaagatccggtcgcagccggctttttcgagtgcgtccttctgcaggctggtggtctggtcgttggtggagatcctcgcgtatccgtaaatcatgctcgccatgtgtccgaccatgccactacccgtcaatggcatggagtttcggaacgttgattacgggacgggtttcggaacattattcgtcggagtgtcgtggacacggcgaccgatccgccatccgttccggaaacctccgttttagggagtggatcgaaccgcccacattgcgaaaaatctttcagccgggagcagcagactagaaaacatcatgattccggttattcaatcgacatggcttaccgttttatggcgtgacggtcacctcggcactgttggcatgccagtcacgccagagcgtcctcaggcaaatgatgcacatatgaggtcgttcgaaccgcggaacgataggtcacccccgtccggaattcattttcgatgacaatgatgcgttggcgcaacaccaaggacgatggagcgacggatccatgcgacgttcgaggaatctcgtctcgccacttcggatttcggtcgaagctatttgggaaacacggccgcataccaaacatgtacatggaacatgtacgtcacatcagaatccgaaaacaagcaaatttcccgacatcaccctcaaccgaggtggaaacacgcggagagaatggctatatggagccaattctgcagtcttgaaaagaaatatgttatccggttgacatatcgttcgttcgcaagtatcatgagaatcgtcaacgatgaacagaggagattccaaacaaaggttatacgtttaacgttaacttgtagatttattcttttacgctcggacattgctgtgcggcataaaagaatgttaatcggttgaaatatcccttgtccacggagacacaggaggaaatgcctgttttgcgggcattgaatggcgaaggagcatcatgaaaaagaacgcgttaatgacagtgttgtcggcgacggcggccgcgacgatgatcgtcggaatgcttgccggatgcggagggaaaaccagtgccacgaaggacgccgacggcgccaccgtgatcaaattcggcatcaatgtggcgaacccggccaagcaggagccggcaacgaacgcgatcgtcgaggccttcaataaagagaacaaaggaaaatacaaagtacagttcgaggcggccgacaccgaatcgcataacaagaacatgaaactggaggcgtccgacggaacgcttccccaggtgttctgggtcgagggaagccaggtcaccggtttcaacgaatccggggtcctgttggacctcaaggacttcctgaagcagaatccgaatgtcaaaaaggccttgaacggttccgagaaagcgttccaggacgactccggggtccagtacgggctgccgtaccagagcaacgtgcagggcattttctacaacaaggagttgttcgacaaggccggtgtggaatatccgaacgacgacacgacatatgacgagttcatccagatggtcgacaagctgaaggcaagcggcgtcaccccactggccatcggcagcaagaacagttccttcgccatgtgggaattcaatctgtggctggccagatatggatggtccgattccgttcaggacatcctgaacggaaagcagaagttcaacaatcccgaattggtcaaggcgttctccaagatacagggcctgtcgaaagccggagcgttccccgagaacatgtcgaccatcgagtacttcgacgcgaagcagcagttcgataccggcaaggccgcaatgttcggcagcggccaatgggattgcgcggagttcgacaagaatctcggagacaaaatcggattctggtgggggccgaccttcaaggattcgaaagccgaccagaagctcgacatgaaggtcccgtccgctccgattgcggtgagcgcttccgtgtccgacaatgaagatatcaaaaacgcgacttatgcgttcctgaagttctactacagcaaggacgcagccgaactgtcgtacgaaaactccatgttccccgcgacttcctacgtcggcctcaccccggactccaagcaatattcgatgtccgccatggccgacgccctgtccaacggatacgagtcgcccgtcgcggcacctgacctgaccgtcccgtccgcggtccagcagtctctgtacgacggcctgttcggagttatgcagggcacctacacgccacagcaggccctcacgaaaatggatgaggcccttgcgaacagcaagtgattcgccggccatcaattaaatcagccagctgggctggaccagacacaagaatcgcccatccggcccagcggcaattgaaattgaaaacagaaagtgtattagtatgcgttggctcagtaagacacgctataaaataggcttcttggtcccgacactcctcgtctatgtcgtgttcatcatcctgcctattttcatcgccattggctacagcttcaccagatattccggcatcggaaaagcacgcttcatcgggctggataattacaaaaggctgttccacgatcaattgttctggaaatcactgcagaacaccgcgataatcttcgtattggcttcggtgctgctgctcgtgctctcgttcctgctcgcgcttctactcaacaacaagctaaagttcgcggacacctccaaggcactggtcttctcccccgcgatcatcgcccccatcatcgtcggcatcatctgggtctacatcctggatccgaagatcggcgtgatcaataacatactgcgttcaatcggcgccggatcgctggcgaagcaatggatcggcggcaccgtcctttctccatacagcatggcgatcatctatttctggcagcagctcggataccttaccaccatcttcatcgccggactcaagatgatcccggaggaggttctcgaagcggtgaaggtcgatggcgcgaacgcggtgcagcgtgtcttctacgtgatcatccccatgatgcgttcgtccatctccacggtgattgtgctgatcatcaccggaatattcaaaatcttcgaaatcgtgcagcagaccaccggcggcggtccgaaccatatgtccgagacgctggtcacgtacagctactcgatgacattccaaagcagtgaatacggatacggcatgtccatcgccacggtcacgttcctgatttcactgggtatcactggcatctatttcctcttcagcaaggaaaggggctgaacccatgctatccaagaagacaaagacggttttctacgtgctaatggcgttgattacgctaatcatggttttcccgttcttgtggatgctcatgatgtccttcaagagcaattccgagatcatgtcgaatcctctggcatggcccaaggcgctggatttttcgaactacgccaacgcgctgcacacgttgaattatccgagactgtacgcgaacacgttcatcgtatgtgcgatctcgatcgtcatcgagctgacgatcaccttcctcagttcttttgctctggcgaggatgacgtacaagcgcccgggtctctccaaggcagtctacgccttcctgatcaccggcctatgcgtctcgccgttcattctcctgttcccggtctacaagatcaacctgttcttcggcctgaaagagcaattcgcgctcatattcccgtatgtggcatcctccatttccttcaacacactgcttttcgtcggctatctgaaggccctgcccgtcgagatcgacgaagcggccgtcatcgacggatgctccatatgggatctgatgatcaaaatcatcctgccgatgacaaaacccgtcatcgcgacggtggtcatcttcaacgtcctctacatctggaacgagtacccgttcgcatccgtcatgctgaggcagcaaagcgcatacaccctgtcgatgggcgcgtccttcttcaagggaacatacacggttgattacggcggcatcgtcgcctcgagcgtgatgatcataatccccgagcttatcttctacgggctgttccagaagaagatcgtcggcggcatggtcgccggcgcagtcaagggctaataaaaaccaataaaacaaaggagattaccatgagtgaaattaccggtcttttcaaagacctcaccgagattaagcacgcccggaacggacggctcgcgagctgggaccaacgagggaagaaccaggactactgggagatccccgccggcgagagcatcacgctgggcgaaatcgaaggccccggctgcatcacgcacatgtggatgacctcctcgtgccgcaaggtcgtggcgccaagcatcctcgatccggtgctcaacgcctcggccgctccggtcatggagatccacccggcgcttggcgtcatttgggacgcctacgacccgttctactaccgcaaggcattgatcaaaatcacctgggacgatcaggacgttccgagcgtgctggcgccgctcggtgacttcttctgcatcggcaacagctatccgggcaacttctcctcgatgccgtttaatgtgtcactcaagcccgaagaagccggaaaatacggcgctccgtgctccgtgtcctgctacttccccatgcccttcaacaagaaggcgaagatcgagatcatcaacgagaacgagctgccatttattctgtacttcaacatcgattacgaaatgtacgacaagccgcttccggaagacaccgcctacttccacgcggcttggcatcgcgagaacccatgcaacggctgggggccggacctgcaggtgaattcgcccgaggtcaacaacgtcaccaacttcaagggcgagaacaactacacgatactcgatgtcgagggcaaggggcattacgtgggatgcaacctcaccgtgaagcatttccaaggaagctggtggggcgaaggcaacgacatgttcttcatcgacggcgaggaatacccgagccttaacggcaccggcaccgaagactacttcaaccacgcatggggaatgcaacgcaacgcgtatccgttcttcgggaccatcgtccacgagggggatacggatggattccaggtctcgtaccgttggcacatcaccgatccggtccgcttcaacaagcatctgaaggtgaccatcgagcacggccacgcgaaccagctgtccgacgattggagctcgacagcgtattggtatcaggcgttgccgacggcaacgcccatcaccatcgcgcccgtcgaggaccgtctgccggtagtcccgcagcctccggagcggaaactggtcccgccggccttcaccgacgagcagaaggccgcccgcgaatcctacgaaaagcgttggaaggaatacaagccgcttcgcgacgagcaattcagaatcaaggaggacaaggcaaggcgcgaatccaagctgaacacggaattcgccaagaagctgcgcgcacggttcgattcggagcagaacgatgagtgagaaaatcatgcaggccgcgatcgagcgggcggaaagatgcatcgcggagaaagccccgacggtatcctcggcgccaagccgtcaaagataccatttcatgggcccctgcggatggatcaacgatccgaacggcctgatctatttcaaggggaaataccacttcttctaccagttcaacccttatagcggcttctggtcgcaaatgcactgggggcatgcggtcagcgatgacctgatgcattgggagcagctgcccgtcgcgcttgcgccgagcgaaagctatgacgaccacccgcagggaggatgcttctccggcagcgcgatcgaaaaggacgggaagctgtatctgatctatacgggcaccgccaacaacggcaacggcttcgagcagacgcagaacgtcgccgtaagcgaggacgggattcatttcaaaaagtatgagggcaatcccgtcatcgaaccacccagcggcatcccgcatgatttcttccgcgatcccaaggtctgggaacacgatgggacctattacctggtatgcggcgcccaacgcgacggaaaagcacaagccctgctgtatcactcgccggatctgctgcattgggatttcttcaatgtcctgttcgaatcacgcggcgaatggggatacatgtgggaatgccccgatttcttcccgcttggggataaatgggtgttcctctgctcccccatgggcgccggcgaaaggaccacggtctatttcgtgggtgatttcgattatcggacgggaagcttcacctataccgtcacgggagaggctgactggggattcgatttctacgccccccagacgttcctggaccatcggaaccgccgcatcatggtcggatgggccaatgaatgggattggatgccgttctggaaagactggggcccgacttggagggaaggctggtgcggctccttcgccattccgcgagagatccgcctgaatgacggcctgaccctatctgcgacaccggtttccgaagtgaagctgctatacggcgaaaaggcgcccatcccgagcgagctcgaagtcggagaagagccgacatccattcaggtcggagatggcgtggcctacgaattgtccttcgacatcgacctgacgaagaccgacgcgagcagtctcacgctgaaactaaggcagcatgacgaccacgcgctgaccgtcacgttcgatttcacggccgcgcagctgcgtgtcgaccggaacaacgcggatgggtggagcaaaggcacgtcccgcagccccctcccgcttcacgggaaggaacggcttgacgtggtcgtgctcagcgaccaaagctctgtggagatatttgtcgatggcggacgtattgttcattcaatgaacgtattcgcgggcaatgaccacaacggcatctccttcgcttcttccgagggaggcgcctcaatccgcgatctgatcggacacgggttgaactcggtctgaatcgcttggccggactaaaggtatatgggctaaacaatatataatgtttagcccatatactgcgtcgtggcgtgattgaataaggagctttctcatggtgacgattactgatgtggcacaagccgctggagtctccaaaaacaccgtttcgcgctacctcaaccagcgtggatacatatcggacaagacaagagccgcgatacaagcggccatcgacgagctacactaccagcccaaccagattgcgcggagcctgtacacgcacaagaccaatctgatcggtcttgtcatacccgacgtggagcatcccttcttctcggccataaccgcccagatagaagacgagctggacgcccgtgggtacaagatgatcctctgcaacacgctgcattcctccaaaaaggaacgcaaatacctcgatctgctgatcgccaacaaggtcgacggaatcatcataggctcgcattccatcgacatcaattactccgatatagatgcgccgatcgttgcactggaccgcaatctgtccgaagacatacccgtcgtcgccgccgaccatgccaaaggcggcgaaatcgccgcggacgccttcatcgaacacggctgccacaaggtgatccagctggtgtcttccggatacgtcaaaacaccttcaagcaaacggcatgaggtcttcacgaaaaggatgtgcgaggcaggcatcacctgcatcgtgcaggaacttcagctgaaccagttcgaattccaaacctatctgaaaacagcggacgagatcctagattcatatcccggcttggacggtgttttctcggccgatccggtcaccgccgccatccagaggcaggcccttgcgcgaggaatgaggatcccggatgacatcttcatgttcggatacgacggcacgttccttgccgaggccgttttcccgccattgcctacggtcgcgcagccatatgaccaaatagccaagaccgtggtcgacgtgctcatgaagaaaataaacggcgagaaactggagaaaatgtcctacatcattccgatatcgggcaggaacatgcccgccgtctccaactaacgctgatcgggcgtcgtgcgccttcgaagccatcattaccgtcaggggaaccaaggcgtaccggtcatgcccggttccccgagccggaatctgggcatggccctccctcggccggccggatccccggggccgcgtccaactcttttcccggcaatccgatcacgtcacgcccgatctcggaccagacgcccgccccgcgcggacggcgtgatgaggaacacttgtatttagatgctcctatacattgtcgagtgtttgggtgtgttgtttcggttcggttatcgagttgatccattggatggcccgtcgtccgggtcgggcgggtcgctctgcgcgatccgtctggccagtgcgagcaggctggcctcgtccggggtcctgccgtcctccgcgatcgccgtcatggcccggaccgcgttcccgaagccgctcgccaggctggccctgtgcagcatcgtcagctcgcgccgtctcgccctgggatccagggcgtcgaggtgggcggcgagcccgtcgggaagctcgccgcgcaggggcgactcgccccacgcgttgggtttgcgggcaagcgcgggcagcagcgtggcggggttcctgaccgtcgggccgccgttcccgtaggagcggggaagggtgttcacgtgcctgccgtcggcggtgcggatctccgcctcgaacgcgcgcaggccggcgagcagcgtccagccgcgccatgacgggcccgcgaggtaacggaccgagccgatctggatgttgccctccttgtcggccttgcgctcgacccattcgaccgcgtcgaaacggcgcgcggcagcggctgcagttccccgcggtcctcgtcgaacagctcgcgtatcggcctgccggaacggtagtggtccgaatccgcgatcgcgtcgcgcctcgacggcagatgcctcgccggctgtctgtgactctccgcgttgggcttggggaccatgaggttgcggcgcaggaagccgaccgcgttctcgacggatcccttctcgttgccggaatacgggttgcagaatctcgtctcgagccggtagtggtcgcagaacatggcgaacacgcgcaccacggtgaccttgtcccacgcgacgcggtggcccacgccggtggcgttgtcgaacaccagcacgcggggagccatgccgatgtggtcgaggatctgggccagcccctcgcacgcgcattccgcgttctcgcccggcatcgcggccacgtaccgcatgttcgagtgcgggaacgtggcgaccaggcagtggcccctgacgtccccgccgccgatcgtggcgacggcctcgccgaaatcgacctgcatgacgccggcgccccagtcgagctcgaggtacccgtcgccgtcggaccgatgctcctcgcgccacctcctcacgtagcgccgcaccggcgagtcgagccctcgaagccctcctcctcgacgagcctggcgtacacgcgtctggcggtatggcgctgcttgcggggcatgagcctgtccgcggccagccacgaatccaccgtgccggaatgcgcgtcggtcagggaacgccgtcccttcccggccgcgggtttcggcgagcagtcctccatggtcgcgtatttcctgacggtatccctcgacatgccaaggcgtctggcgatttcgcgccatgacacgccctgggcgtcgagaatcctgatacgttgttgtatcgacaccggtttcgtcattcctttcctttcccgagtggccttgttcggccgggtgtgtttcaactcgggaaaatagccgggttatggcgggccggtgcccttcatctcgccatttcggtgaaacggactaattcccaccgcttttcggaccggaaagttatgccgcatcggcctaacttctattgaacagacacatccgatttgagatgctttccgacggtcattcggctgagtccgaccttggaggcgatatatgtcttcggcacctcatcgagcaggacttttactcggaggctcttcgcggccgaagctgctgtgttgttggctgatgcaatcgcgatttgtatattggcacctgccgcaaacgaagtcaaacgctacggcgtgttgtcatatgccaacagtatttctacggcgttgccaactgctgtcaggtgataacatttgcacatggcaacaaagattgaatgggatattttcgactacgcagcaagagacgtactgtctgaattgttggacgaattaggtgcttcttaccgcgaaatggaaagcctgacatatggtgaagtaacctatagccgtattcgggatataaagatgggcaataaagctcccgtccgactttctgagttcatcagacttagcgcaataagccattgtcttccagcgcaggcacttcatatggtgatagatcgagtaaacgagctcgaaaacgaagaatatatgtctatgacgcaggaagaacgcgattcaattaacgaaatattcgaaatgctaagaacgcagcagtcctcagccgacactccagaacccatcgtccgatctactgtcgatgatgataatgttcgtgtggcggagaccctcagcaagctcaaacgtggtgacctcgacatcgccgccttggaagacgagcacaagttcgacggggacggcgacggtccggcgtgatatttcatgtctctaatgttccatttcggcgttttggaacattagaagtatgattttcgtttatataaatgcttttctggaacgattggaacaatacgatggactataaaagcattcggcaaaccgtgcatatgagccagtccacggaaacaccggagaccatagccgaacatgaataccggcaacgcctcaacggatggagcacgttccgatccggcatcacactacgcggcaacgaactcttcgtcgtcaatttccgcgaacttgccacgatcgccgacagcatacgcgaccaggaaaacaaagtaatcgaactatggaacgcgctgcccccaatcgcacgccgcgcctacctgcacgacctcatcggcacggaaatgcaaagcaccaatgacatcgaaggcgtccgctccacacgcagggaaatcagcgacgccctcgaagccgcactcaacgacgggccgcacaaacgattcagcgaattcgcaaaactcttcctcacactcagcgacgaacagcccgaacccatgcccgaaacactcaacgagatccgagccatctacgacaaagtcatgtcaggcgaactcgccgagaaggacaagccggacggcgaactgttccgcaacgggcctgtctacatcgacaacccatccaccggcaaaagaatccacaccggcatcacccccgaatcggaaatcaaagtactgctcacgcaatggctgacactctcacgcaaccgggacgtgccaccgctgatccgagcggcgatgtgtcacttcgcattcgaatacatacacccgttctacgacggcaacgggcgcacgggacgattcctgttcgcgctgcagctcagacagcacctgagcgcaccgaccgccatcagcctcagccccgtgatctacgacggcaaggaccgctactacaaggccttcgaagacgcacagcacccgttgaaccggcgtgacggcagcatattcgcataccggatgatgaaattcgtcgcggacgcacagaaaaaactcatcgatgacttgtctgagaaaggctccatgctcctgcacgccgtgaaccagctcgaaagcctgaaagaggaacggcagtgggacgacgtcgaagccaacataatcgcggtgctcgtgcaggaggaattgttcggggaatccccgcacagggtgacccgtaggcagctgggcgagggactgggtctgggaagaaagaaaatcgcgcaaggcctcggctctctagaggagaccggtgcagtgtcgcataagggcacccggccggccttctactcactcaccgatgaaagttgtgcgagactgcttgccggaataactggaggaggggacgaatgaactacggatggcagaaagagcccctcctgccgttgtcgccgcgcatgagctatgggcagatgcgcatgatcctgtatcaggtcgcgccaaacctgcacgtggccagcgcccgactgcccggcaaactcgacgggcatatactgcctcgccaccaacaccgtgctcatcgaccggcgcatcacctacacacgcaaacgctgcgcgctcgtgcatgagcttgtccactggagacacggagacgacaccagcaacgggtgcaacggcggcaagctcgaacaacgctgccggcgcgagaccgccatactgctcatcgatccagccgaatacgccttggcggaacgcatgtatgacagcaacccttaccagattgccgctgaactcaacgtgaccgtccaagtcatagaagattacaagaactggctacacgacagcgtggccgcctagaagaaagaagaaaacaatggattcggcatctctcatttttgcgattatcgttctgctgataggactcggcatcagctacttcgtcatcaaatgcgcggtacgcaacggcatcaacgaatcactcctgtttgccaacaaggaacgttgggaaaaagtgcgcaacgatttccctgacctaaagctccccgcatacgagaaccgccacaacgacaaccccacatacgagccggtgcaaaaatgaacggtataagaaaatcaatggcagtagtgacatcggtgttactgctcggctctattgccgcctgtggctcaaacaaggaaacggcggccaacgacaaagccgagatccagtcggaagctgaagacgccatcaaagggaccgattcccaaagcagtcaggaaccgttaatcgataacggactacacggcgaatgctccggctccgacccaaggctccagtcggtgaaaatcgataccagctcatacaagattcgagtcgagataccgaacaacagttcgatacaggcgagcgactattacgggtactacatcaatttcaccaatgattctggcaagatgtggcaggcgggtttcaagaatgtcgtcaactcgaacgagacctcggtattcgtgttcgacatgggaacaagcaagcagaacaatctcgggacatggaatgatctggtgactctgcaggacgggactttctacgcgatgctgcccaatcaggatattcgcggcaccggcatcaaatggaacgcgacgctatccatcgatggccgggatgtggcgacatgtcccgctgatggaagcgatacaaccttgaaataaaagagttgccctgccggcgttgcagcgccaacagggcaagtgaagaatccagctagttcaagaaaggaggacgcttcgcccactatcctacacggggcgaagctatacccgaaatgtcaatttgcggacttgtgcttgtcatcgcctttcgatgccttcccggatttgaacgcctcgatgatacgcggcataatgaaaccgacgcttccggcgaagctgatgaacgcggccgggttcatgcccagagcaaagaacaccacggcgcagatgaacgccgcagcgggaatcaaagagaatacgacggcggtgaatttgtagacccagttctccgctttccggtcatcggcatagatttcgactacacgtttctgactgtcgatttcggaatgcaaggaatcctcggccatacgaagaatcctgtccgccgcgccgggaagagtctgttcgtattcggcgagttccttgctggacggcaaggggcaggacgtcacctccatatgagtcagagactatcggcgatccatcgccttccggatcgaatcgccggtcagattccaagccttggtctgcagttcgagagacgtcatgattttcggagcctccgattttcgtgtcctgcccgtcagtcccgctgtcacctccgctttgaatccgcgaatcatcgcttgcttcgttgatgtcctcatggctcatcagtcctccaaaatcacgttatacgttttccggttccgaattaaaggcccctatgccctcctcttcgcgagtcgtgccggacggttcatcatcgcgcggtgcagtcgcatccatttctcatccacggcgttgcgtggcttgccgtcctcgggcggcgcgtacgtcggtatccgtcatggtcatggccgcctcctttcgattttggcgtaagtggataagcttatgtgttttcctgccccttgtcagatcccattaaaacacatcaaaaccggaaaaacccgtacaagtgagtgaaaatcatggcgaacgtcaccagatacaagaccagcaaaggcgaagtgcgctatcgcgtccgttaccgcaagccagacggtacgcaaaccgacacggggggagttcgccgcaagatagatgcggagaactgggcggcgaaacgggtcaccgtggccaaggccgaaggcacgtacatcgatcccactgcagggaagataacggtgggggagttggcaccggcatggttggccaagaagaagctcagcgccaagcccagccattaccggaacctcgaaggagcatgggagaaatgggtgaaacccgaatggggaaacaccccggtatcagcggtcacccgcgaggccgcgcaacgatgggtcaccggaatcagccagggcaagaccgccaaagatgaacaaggcaacgagatagtgctcgcaaagcctcggagcgccagcgtcgtcctccgcgcccacggcgtgctcgccggaatattggatgacgcgaaagccgaccggcgtatcccggacaatcccgcacggggcatcgaactgccacgcaagcgcaggaaaaagcacgtgtacctcaccgccgaacagcttgaccggctggctggcagcgtcatgccatggagacgagacctcgtgctcgtgctcggactgtgcggcatgagatgggacgagcttatacccctgaaggtgatggacgtcgatctcaaaaagcaccgtatatataggagtgagcgcgccgatggtgggcggcgtcatcatacctgacggcgccaagacctacaaggcgcgcgccgtcatgtacctggtcgtgctggacccgatcatgcgcagtctgtgcgaggggcgcgagcccggcgacctgctgttcgagcagccgggacgcgagggcatgatgatacgcgagtggggtaatgcgagccgtgatgacggttggctgtcggtcggcctgcggcgtgccggcatacccggccacctcaccattcatgacctgaggcacacggccgcgagtctcatgggtcagagcgggcgcgaacgtgaaggccgtgcaacggcagttggggcacaagagcgcggccatgacgttggacgtgtacgccgaccttttcaacgatgatctggatgagctgtcggagcgcatgggtgagatgctggcgcgtgagaatgtgggcaaaatgtgggcaaaagaggtttcgagggccgcgtgattgagctgggagtaaggctgtgtgcttttctccggtgggttcgagtcccaccggaggcaccttcactggactgcggtcagcatcgtttgccgcggggatttttcgtatcggtcgccttcccgaaacaaacagccattagtctgtgtgatgttgtgacgatgaatctgatgaaatgagggaacgcacatggcttcacgctggaccgacgtcgaacgggtcgatgagggcgccttgcccaccatgctcgcccaggctgtcatcgcaggcacctcgctgaccatcggcgccatcgcctgttccggcttctacctgtccatgatcggcaatgtggtggctttgctgccgtgggtgaccgtcatggtgctgatcgccgtggctttttcctacgtcgtcggattcgctttgctatggtgctccgaagcgctgaccatgcgcatgaaggacgccttcaagccgtgggcctatggtgtcgtgggactgctcggctatggcatctggggcatgttcgtcatgagcgccatgatgaactcgctcaaccagccgttgaacggcgtggtattggctaatggcgatgtcattgccctgaccgtcaactatgcggtgttcggattcatcgcgttcctgctggcgcaggcgtatgcgccgaaaatcgccactaaaaagggtttgaccgttggactcatggtggtgcagatcgcgctcgccattatcggcatcatcgtgctggtgatgatgttctcggcattgtcccactaaagcattttcggccgtgccgcactgaaactggcacagagccgaagtgccgtgtctccttcgcggcatggacgtatgctggtatatgtcgttaatggctatacggcgacgcttgttcaggagaaggagagctattgttcagcgtgcttgacatgttcaccatcggcgtgggtccctcttcctcgcataccgtggggcctatggcggcagcatacgcgttctcttcctcgttgcagcagaagcatgtgctgaatcgtgttacacgcgtcaaaaccacgctgtacggttcattggccttgactgggctcggccacggtaccgatcgcgccgttatggccggactcgaaggcaatgtaccggccacagtggataccgatcatatgctgcatattcgcgagacttgcgcgctggataacaccttgaatctcgccggggccaagcgtattcatttcgattatgaccatgacgtgattttcgagcagtggaagcgcatggccgcccatcccaacggcatgcgattccaggcattcgatgatgccgccaacttggtcgacgaacaagtctggtattccatcggcggcggtttcatccgtcagggtgcgcccgatgattccatgatcggcatccatgaccgtcctccggccggcacgtccttcgccgatgaagacgagtccgctgtggaacccgtaaccgaggtgccgtatccgttccattcctgtacggaattggtggcactatgccggcgtcacgatatgagcattgccgatatcgtatgggccaatgaaactgcgctccgcccggaagaggctgtcaaggccgagctagatggcatatggcaggtgatgcgcgactgcgtgagccacggctgcacatccaaggagacggtgctgcccggcggacttgacgtaccccggcgcgcgcccaagatgtatcagcgtcttgctttcaactccgatgtgcttcgccgcaacagccgtcgtaaggatgccgtgctggaatcctcggatgccgcatgggtggatctatttgctctggctgtttccgaggagaacgccgggggaggccgtatcgtcactgcgccgaccaacggcgcggcaggcatcatccccgccgtgctccactattattggcacttcgtggacgatgccgatgatcagggtgtgtccacgttcctgctgaccgccggagccatcggttacctgttcaaacgtaatgcctcgatttccggtgctgaagtcggatgccagggtgaggtcggctcggcctgctcgatggccgctgcaggtcttgccgctgttatgggcggcacacccgaacaggtagagaacgcagcggagatcggcatcgagcataatctggggctcacctgcgatccggtgggtggtttggtgcagattccctgcatcgaacgcaatgcgatggccgccaacaccgccatcaatgcggtacgtatggccatgctcggcgatggctcgcatatcgtgaccttggatcaggccatagccacgatgaagcagaccggcgaagacatgatggccaaatacaaggagacgtccaaaggcggtcttgccgtcaacgtcgttgaatgctgacttccgcaggtttgccaatagtgctattgtagggcgcattgtgtctgtgaaggaggactcatggcagatcagatgcccaaggtgaatgccgaattcggcaccacgcccgttatcgagtttccggcgcccgaggccccgaagggtctcaaggccgttgagttggctgagggtgacggcccgatggttcgtcgcggcgacaccgtgaccgtgaactaccacggcgtggtgtggggcaaggacaccccgttcgactccagcttcgaccgccaccagcctgccagcttcggcatcggcgtgggtcaggtcatcaagggttgggaccagaccgtgccgggccacaatgtgggttcccgtctcgtggtgtccatcccgccggaatacggatacggttcccgcggcgttccgcaggccggcatcggcggcgaggacacgctggtattcgtcatcgacatcatttccacccgctgacgcctgttcagcatgtgacgaacgccggggtcgcagccggcgtttttgttatagataacgtatcttcattcagcatcaaacggttcaggaggacgatatggctgaggacaaggtctacctgctgacgcaggaagcatataacaagatgaaggaagagctggcccatcgtgagggcgagctgcgtgaggaaatcgctcacaagattgccgtggctcgtgccgagggggatctgtccgagaatggcggttatcaggccgcccgcgaggcgcagagcaagaacgaaggccgtatcaccgagctcaccgtcaagctgcgcgactccaagattatcgaaaacgctcccgagggtaccgtgggcaacggttccgtggtgaccatcgagctcaacggcaacgagatgacctacgtgctcggcagccgtgacatcgtggccggcaccgactacgagatcatgaccccggattccccgatcggcaaggccatcgagggggccaaggtgggcgacaccgtctcctacaccgcaccgaacggccgtgagctgtccgtgaccgtcaaggccgccaagccgctggcctgagtaggcagaagcgcatagagcaagagcctgaaacctcgtattgaggtttcaggctcttgctctatcggctctcgcgcgttgcgattaatgccacagtgccacgattaccatatagatcgccaccatgtggcaggcatagccggctacggtgccgcagtggaagatttcatggaatccgaatacgcgcggccagggatccggcttgcgcagcgcgtagacgatggcgccgaggatatagcaggcaccgcccgagcacaacagcaccaccacggcggggcccgcatacggcgaattccagaacatcaccatataggccagaccataaataccgaagatgatgtacaccaccgtatatagccatcgcggtgcattgatccaaattacgtggatgatgatggctatgaccgtgcatgcccacatcgaaataatgatgatattgcgccagaatggttccagcgcgaatgaagccggcgtgtatgtgccggcgatgagcagaaagatattcacatggtcgatgcggcgcagtacatcggtgacgcgggggatccaatcacccagatggtagcaggctgaattggtgaacagcaccaacgatgatgtcatgaatacggcgcatgcccatttcagactggctccgtgtgccaggcagatcagtacgatgcctgcggccaaagacaggggagcggccaccgcatgaatccagccgcgcatagcgggcttcggacggccgtgaacatcgagacgaatcttgcgctccacttccgcaggggcgatgccctcgattttcagtgcccggttctctgccttggccagcgtgcggctggccttctcttcggctttggctcgaatggcttcggccctgaactgcgccttgacgcgtactgcttccgctttggcctgcagcgcctgttcgcgtgcctctatgacggcctgacgcttcgtctcgacatacgagtcggacggttcgttggcggccttggaattggtctgctgggtcgttgccatcttgtcgtcggttgctgatgccatatgattcctcgttccgcgcgagctgacggtcattccttacgtttccgtaacttacgttagcgtaacctactggattgtcaataccgactcacctgtaatttatcatcagatcacatcacgtaattcggcgataagcggaacctatctgcgtatgatggacacatggctgatttttcacatattctcgcaacgcgccccgatttcgacgacgacgaccgcgaatggctgcaccatctcgttgccgactggcaggtcatcgccgatctgagcttcgctgatctgctgttgctcgtgcagaacggcgacggcaagtacgtggttgcggaacagtgccgcccctccaccgtgatgaccctgcgcggtgatgatgtggtgggagacaccatgcccgatgatatgaccggtgagctggacgccgccatgcaatccagcgtggtgttccgttccactgtgctgcgtaccgtaggcaaggccacggtgtgcaatgtatacgctccggtgcggcacaatggcaagacgcttggcttggtggtgcgtgagacgaacatggccacgcgtgaatccaatggtcgctacgaatccgaaagcatcaatgccggaaagcaactgtatgagatgattccgcgcggtcaattcccttacaaggattcggtgatgagccagcgtcatatcgcgcgcgtggcggacggcttcatcatcctcaccgtggacggcgtggtgcggtatgccgctcccaacgccatcagctgtttccgccgtctcggcctgctcaataccatgcccggccaatacctgagcgagctgggcacccagctactcaaggagaacgatccggtgccggatactttgccgctggtgctggctggcaaggcggccgttgactccgagctcaacgccaaccgttccgccgtctccatgagatcgctgccgctgtacgacaataacggccgtgtcggtgcgattatcctatgtcgtgacgttaccgagctgcgccgtcgcgagcaggaactgcagaccaagaacgccacgatttccgagattcaccatcgtgtcaagaacaatcttcaggcggtttccgcgctactcaggctgcaggcgcgcaaaacccagtccgacgaggtcaagaaggaactgcaggaggcccagcgccgtgtgcagaccatcgccatggtgcacgaggggctgagccagacagccgatgaagtggtggactttgacaaggtgattgccaacctgctgcgcatggctgtggatctggcaaccatgaaggatcagcacatcgaaatcaattacatgggcaaattcggcatgatgcccgcccaagacgccacgccgttgtctttggtgcttaccgagctcatcaccaattccgtggagcatggattcgaggggcgcaaggagggacatatcacgatctccgtgggacgttccggtccgaacctcaatgtggtggtcgaggacgacggttccggcctcggctctgaagagcagggcggcatggcacgttcctccggttccggcttgggtacgcaaatcatcaacaccttcgtgaccaacgacttcggtggttccgtgaactgggagcctcgccgcgaaggcggtacccgtgtggtgctggatatgaagctgcgtgccgcacaggacgagtaatagccctaacgcaaaaaccctcccaaacgggagggttttgcataaacaagcaaaaatatcagatctgcatctgcatagcctgcgaacggcgggcgcgcatggcgcggcgcttcagagcgcggcgctcgtcttcgctcaggccgccccagacgccataatcctgattggtgtccaatgcgcacttgaggcatgcatcaatcaccttgcaggtacggcatacggccttggcctcttcaatctgattgtatgcggcaccggtgttgcccaccgggaagaacagttccggatccttgtcacgacatgcggccttggctcgccaatcaaaagcgttgctcattgcttgcctcccttaaaagccctgtggctgatgtgattttccttaagtcctgtacaaggtaaccacgaaccggtgcgtttttcaagaggttttgcccagaaaaaagcggagattttatgacgcgcactgcacaaggcatgccgaggcacccgcaatcagaaccgcgcggccaggcgtgtccaaatcctcctgactcatcgtgttcaccagtgatgatggtatgcccgctaccaaatctgccgttcgatctccgcaggggaacacaatgcgtgtgctgcaatggtccgggacccgtatgtggcggggtgagcgcaccgcgaataccacgataatggacgaatcggcaagggcttgcctgaaccgtacggcctgcgtatcgcagcagagcggatccagcaggtcgtcggcgtcgtcaaccagccatatcaaacgtggtggtgccggtgcgatgcgcgttgatgcggcactgagccggggacgatgctcggtcgtcgtgagtcgttggcccctgtatagaccgctgatatgcagcatcaggccgtccatggcacttacctggcgggcaatgacttcgagcagcgtggttttgccccgtccctgaggtccgatgatggcgatattgccgcagtcaaggggcacaaccgcatcggtgagtgtgatgccgttatccgataggccaaaccgaatacgatccacctgcccggataccggatggtcttggacactccgtggcaggggagaggtgaacagtgacggtcgcgaacgtgtccccacgaattgggcagcgaacgcgatttgccggcaatatacatcgatattgtcggctggcgcgcatctgaatgccgtcacgtgttcgccgtcattgcagtaggcggcacccggcagtgcgggacttatggtcgcagctctggaatcgcccagcagctcggtggattgcaatccgtctcgcacgcgcagacagatgctaatggccatattcgctttcatatcggtgctgacctgaccaagcggattctgcgtgcaggcgattagatgcatgcccagggagcggccaagcgaggcgatacgcaccaagcgcggcatgtaatccggcagctggtctttcagcgcatggaattcgtcgatgaccacgacaagtcgaggcggtgcgtcgcgcatgtcatcaatatcggatacatgcaggtcggcagacagcttttcacggcgggtcagttcggcttccaaggccttgagcgcccgtgcggcatgggccagatcgagatcgcagacgcttccgatggtgtggggcagttgctcgagtttgcggaaagcggcaccgcctttgaaatcaagaaaaacgaaattaagctgatccggaccattcatggccgccaaagctaagcaccagctttgcagcagtaccgatttgccggagccggtggtgccggccaccagagcatgagggccctgcctgtgcaggttgagcatgaacgggccggacgcggtgacgccaagcggcacatcgtaatcggaaggctcaagccagttgcggactatggttcgccagccaaggcggtcgaacgtcagcagggattcgatggagggcgcatcggaagtgcagaacatgtcggcagcgtcaggggaggggcctcggggagcgtggtgtgtctcagtggactcgacagggctttgggacggttcgacatatggcagcggcaatgtgacgagcatcgatgcaaggccaccgacgatgccgggaaccatgactagggcaaacatccattgcccgtgcaacgccattattgccagcatcatgatctgcgccactatcggggcggccgcaacgagcaccatcacgcgggagcgtgcgccgcgcggagcggttgtggcaccctttcttgcaggggccggtaatgaacgatgaaatcgtattgtgcgttgccgttcacgagtcatgctttcagcgtgaatgaaggatgcgcgtagcgcaagcgataacgggatatgtggttccagcttgccgggcgtgcgtcgcggcaagctgattggttgaattatcagctttcggcgagtgtacctacggttcctgcggcgtgggtgcccgcagccagctggctgaacagttcggtgttcttggcatcgtcaagcagtacggaggagccgacgccatccatgtaataatcgggattggaccagtacacgctgccggatatgcccttgcttcctgtggcgtctttgaacgccaacgccatattcaccaaggttagcggcgtggttttcccatcgacggtaagcgcactcaagccggcttcagccatggtcgtcaccgtcttgggattggtcaacgtctccttgctggaggccttcttgacaatggcggaaatgacctgacgctggcgggcattgcggccaaaatcgccggtggcatcggcataacgcatacgagagaacgacaatgcagtcgaaccgtccgcgttatgacatccagctgtccagttcaggccggaataagcatcctgtacgtcctggtcgtaacacaattccacgccgcccaaagcgtctacgaccttctgcaagcctccgaacttgacctgtgccacatgatcgattttctgtccggtcaactgctctatctcgccgaccaaggcctttttgccgaccagctgagccacggcattgatcttcatgtattggtcgtccacgttcatcaaggagtcgcgcggaatggaaatcagtgaactggggccggatttaggcttggtcagcaccagaatcgtgtcggttcggtatccgctgatatcgtctacgccaccaaagttagtggaaccgtcacgctcatcggaaccgagaataagccaggtggaagccggcgtgtcggctgcggtggtcagccaatccgctttgttgagcttgccgtccacccagccccaggcgccgaacacggcgagcaccagtgctgcgataagcaatatgactgcgccgatgacgccattgcggactttatgaccacggccgcgtatcgctatggcgctgttgtgcccggacgtcatagctaccacgggcgttctggagggggtggcggagcgaatgacggatgatgccggcgtgctggcattgcgagatgagccggacgagcggcgtgcctgcgtcggtggaatgctttgcggctgggaggaggccgaggtgcttctgcgagcggatcggttcacattgggggagaagctgggcggtatgccgttatcgttgccgccggcggctctgggtgttcgcgacgatgatgagggagtgatggtacgtggtgtctgtgacgatgctcgtgaacgtcggcctgccgaaggaataaaactcggcggattgatctgcggatctgccccacctgattcctgcgtcatgcaatcctcccaaaactgctcaatttactgaatgacacttttgcacatgctgtgccgtgccatacctagggagcgctgttcctgtgcaggaacggcacaatattcatctcaattggttatggagtgcagtgctcggtggacggcatatagcacattgaggcggaaaaaactgtaatgacacgagacttgatttgacaaattccaagtcacatgtgtgtaatttgtgggtacaagtacaactcataggcaaggagggtcgcatgtggggtgcgattgacgattctgccgaagagcctttgaatgagttgtggggactgttcaagcccgatggtgatgtgtcttggcagcacaaagcattgtgcgcacagaccgatcccgaagcgttctttccggaaaaaggtggttcgacacgcgacgccaagcgcgtatgcgccaaatgcgaagtccgcgagcaatgcctgaaatgggctattgaccatgacgagcgttttggtatctggggcggtatgagcgagcgtgaacgccgccggtataagaaggaccacagggaacaggcatagctatatgcacggccacttcaaggtcagtgcgtacactgggagtttatgaatccgacagcgaatagcgatatccatgaagctgtggtcgatgccatatcggcaaggccatacacgcaccggcaggatgtggatgccggcatagtggcggtagtcaccgttgaagcggatatgcgttttctcaatgccacgcttcgctcgctgctcacgcaaagcgtattgccgggcgttatcgtcatagccgatgccactgggctcacaacgcgatcggtgcaaacttcatttgaggtgatccactcacctgcaggtcccgcaatggaggtgccgcaggcaaagcaggtgagcgtgcaagtggtgcgtgccaagggggcgcgttcatttggtgatgccgtatccaaggcgctcgccgccgccgatcttgattcttccacgcgtgcggtgtggatgctgcatgatgattcccgtccttcggataactggtgcctggagcgattgctcgaggcgtggcgcaatgcttccggagccggcatcctaggatgcaaacagtgcgattggggaggcacccaattgcatgatgttggtatgtacgccggcaatcatgccgtgcactccctcgtggtcgacggtgagcccgatcaagagcaatatgatggtcggcaggatgttttcgcggtttcccttgcgggagcattggttccgttatcgcaactcagacgactgaagggcattaatcattggttcactacctacagtgaatcggttgacttctgccgccgtgtctgcttaagcggcaggcgcgtggttattgtgccgcaggcggaaatctcgcatcgtcgcgcacgctatgagggcatccgtacccgtggcggcgaaccgttgaatgaggagagtgccatcaatccggccatgacggtggctcgttcgcagcagcggtatctgtacaccgacattgcacgctcggcatggatggtggtatggctgtggcgtttattgcgtagtttcggcatggccatcgcgatgttgttccgcaaaaagccatatgaggcatgggtgcagctgtgtctgccgtggttggcgttgacctccatcgccggtgccatgcgatcgcgcagtctggtgactcggcaatccaaagtgtccatgtcctcattgcaggtgctgactgccgatcgccagcaaatcaagcaattccatgaccgtcgtgacgcgttcatggcccagaaggggctggtattgctgagccctctggaacgtgcccatctcaggattcgtctgatgcgccgctgggcgggggccttgggattggccgtggtgtgctttgtagcggtgatgctgctgtattggccggtgttccgttcgctgttctctgacggatcattgtattccaatgcgttgttgcccacgggcgcaagtttcgagcaattggtgcagtccaccactacgccgtgggtgtttggatccggcgttggccttcccgcaccccccacgccgtggctgttggtattgatggtcgcgtccatcgtcactgctggtcatgttcctgccgccttgggactgatcttgtttgccgctgcgccgttgagcgccttgtcattctgggcactggcgggtatctttacgcgttcggatgtcgtccgtgtgctgggcggattgctatgggcctcaaccggcatgatgtttggctggtatgcacaggcgaatcttcccatgctcaccgttctggtgtttttgcctgccgcttttgcattcgtgttccgtgcagtgggcatgtaccacaccgaggatccgttgaggcctcacccgtccgtacaagccgcggccatctccgcgttgtgctttgttcccgtggtggccgctgagccgcaactgctgctggcgttgattgtggtattccttattttcctgctgttcgtgcagcgcaagcgcgccgcattattgctgattcccgtgcctgcagcttttgccgtggcccccaccattctcaactccatccgatacgcagacgaaggattttggcgtcagctgttcggcgatatcatgttgccttcctcggcgcagaacggatcgccggcctcattgagcctgcttgaatcggctcaacgggcgttgggctggaatcctttgtccggacaggccgtcgatattgcaatggctgtggtcttcatagcgattaccatcctggcggttgcctcgttggtgttgccttttgcactgagaacatcacgactgatgtgggtggtcatcgtctgcggcggtgtgctggccatgtcttcaagccgtattgccatctcagtcgatgctgatggcgtggtggcgggttctgcccagcccggcatgctgatgatgatcatgggtttcctggcctgtgtctgtctggtggccggcggtgccgtcaagcggttccgtccgctgcattcttcgtccggcgagcagaccacggagacccgtcttcacccgttgattgtcttcggtcgtgccgttcttgcggtgttgctggctgtctgcatcggtattcaatgttggtatggactggtgcgccatcaagatgagggacttaatgtttccggttccggcctgcccatggtggtcaccgattacctggagtccggagcggaccatcgtgtgctggcggtcagcgctcagacacgcaatacggtcaattacacggtgatgcgcacctccagaggcgatttgatcgatagttcgccggtggaacgggtgcgtttgctcgatggcaagcatgatgacgtcgatcaggtgctggccaaggcgtgcgcgactttgctgtccaatccggacgagcaggcgattgccgatatcagcgctcttggttttggtggcatctatgtggtcgccgatacgcaatccgatgccgatacagtgccttacgaacagttgagcaccaatatcgccgcttcggacggcacgcagtcgctggtctccaccgatgccggcagctattaccgactcacgctgcagaacgccgatgcccagaacgttgacacctcttggcagcagcgtacacagcagagcgcctggcgatatgcatggctgatttgcctatcggtgattctggtgctgtattgccttgtcgcagtgccgcgcagacggttgcttgccggattggaggtggaagcatgagcaaggagatagtttccaagtctaggcgtgtgaccagcgtggtgatcggtgtgatcaccatgattgtgctgattgcgttgctggccgttttggtggtgcttcctggatccaagcagtgggtggatgcggtggcggccaccgacgacgccatcgaccagaccgtcagtcccacgcagactgaggcctattgtcctgcccctatggggttggccgatactggcagctacggggatagcgccttccaagcgacaaccggtaacctcagcacacaagcgcgttatgccgcttttgactccgtatacagcgccacggtatccgcgttcggtgatgattccgctgacaacatcaccttgaaggatgccgatccgaccgataacgacgccgtcaaaacaggtgcccagtcaatcgacaacgggtctcgccttctcgatacacgcatgctgcaggctgctgaaggcacaggcactgtcggctccattgcctcctgggcggatgacggtgacctcaaaggtgtatccgcatcatcatgtgagaccacggccttaagccaatcattcctgctgtccggtacggcgaccggcaccacgcagcagctgattatcgccaatccctccaccaagcccactaccgtggagataaagatttggggatcgaagcagtcaggcgagatggcattgtccacgcaatcctcattggccattcccgccagcggcgagaatgcactggacttggcagctgccgcaccgaatcagcaggggctgtacgtcaccgtatccagcaaggagactccgatcgcggctgttgtccgcacggtgtccatgaatggactgacgtcaaaaggctcggatttcgcgctgccgcttcatgatgcgtccaatgcctcagtggccacgtcgatcgcgaagggcgatgcggtggatgcctacctgtatgccgcttccgcgacgggtgtcacgttgtcgtggatcaccgagcatggtctggtacaggcaaaggatgcatcattgcaggccaatcgggtgaccgtcgtcgatttgggtgaggctcccgaagatgcattgggcgtgatgtccactgccgaagacgatgtggctttcagtgtgaaggcgtcccagtccggtgatgacgatcaggctgatttcgccctgattaatgccgcggctccggcttcgtttactggtcttgccattcctgatgatgtggatgccacggtatcgttggcgaactcgtccaatcagtcacgtaaggccacgttgcacgcctatgacgccgacggcaaggctaccgcctccaaggaagtggagattgacgccaatgccgctatgacgatagatatcaaggatctatcgaaagacaatgaccaagcagtgttgctgatgcttgaggatcagtctcagcagattggctggggcgtgcgcttgacccacgccaaccttggcgatgacaaagtcgccggtctggcatcgctgggtgccacgccgctgatgcctgccaccacccatgtctgggcgcgcagcaatccctcgatcgtccactaggcgagtggaccccgggtttatttacagtccaaagtcagggtcgatttcctcgggtctgcggccgtagagttccgccattcgggaaaccagctcgtcacgaatcgccagttgcagttcgattttggtgggtgcttgcgtctgtaacggcatgcggtacagcacgatgcgtgccggaatgccatgccctgcggggaagcattgcgaggtcatattcggctcgacctgccacggcaccggatccgacggcggcacatcttccacagcgaattgtaacgggcgcaccagttcgggccaggcatcgccgaggcgacgcacctgagcggccaccatatcgtcgaacatgccggtacgtgtgcggtagcggggcagtcgggtgccgaacatcggggtgcgcgtacccctgccgtgacgattgcggtacacgcgggcattccaaggtggctgaagcatggttccaccataggccaaggcgacggcaacatgcgctaggattggttcatcgaatcgaatctcatcagcaaggaggacacggcgaatggtggtacgttcgtgggccgaacttgatttggatgacatatgcgcgcatgcgcgagtgttcggctttgatctggacaacacgctggccagttccaaacaacctatggaacccgcgatgatcgcacgattcagcgcgttgaccgcgcacgcgaccgtggctttgatttccggaggcggcatggacgtcgtcacctcacaggtgctggatgtattgggtccggatgccgatcgcggccatctgcatgtcatgcctacgtcaggctcccgctactatcgctgggatggggggcgctggacgctggtctacgcacatgatttggatgaccgcactgttgccgccatcacctccagtctggaacggcgcgccaaggaactgggcatgtgggaagaacatgtctggggaagccggattgaaaatcgcggcagccagattaccttctcggcgcttggccagtatgcgcccgttgccgtcaagcagtcatgggatccggacaatatcaagaaacgagcgcttgttgaagcggtgaaagcggatttgcctgatttgagggtgcgctccggcggatattccagcgtggatgtcagcaagcatggcatcgacaaggcctatgcggtgcgtcgtcttgctgagatacttgatgtgccggttggcaacatcgtattcgtaggagatcgcatgactcctgacggcaatgattatccggccgtcgcagccggtgccgtgggaatgaaggtcgagaacccccaggatgcgttgggcctgatggatgcattgctgcaacgtgtgggagcatcggcctaaacggtcgggaggcctgcctgggcgaaaggggatgcgtgttgagctgggatcgccgtgattcgttgctgggcatgatgcgtgacgcgttgtttcctcgtggctgtgccgggtgtgacagaccggatgaggtactgtgcggcgactgtcgttccctattcgccaactggcgcaaccgggaactggtatcaggtcaagaaactcagggtgctgtgcacacatggtccgcgtcaacatatcagggagtcgtcaggcatgcgattcttgcatggaaagaccatgatgataccgagctcgatacgatattcggcgaggtaatggcctcattactggaacacagcgccattcaccgctcctgccgtcggcagaccgccgtgctcgtggttccggtaccttcatcgccggcttcgatgcggcgcagagggagacggcatatcgatccgttatccaaggccgtggcaaacgcattatgcgattacggcttcgatgcgaaaccatatcgggtattggccagtattgcatcgggcggccgatcggtgcagcaggcgtcatcggctcaacgcgcccaacgcatcggtggacgaatcgcacttgtctctgatgccgtgatgcaaggccaacaggtggtactggtcgatgacatcatcaccaccggctcaacgttgcgccaatgcgcgcaaacctgcagacaggccggcgccgaggtcataggggcaatgacgcttaccgaagccaaaaaggtggtataacaacaaagaatcctcgccggatcgacgcggattcatttgcggccgtgcggccctagatcactcattggcaatgtgatatttgggcagggtgatctcaaaatcggcgccacgggtgtcgtccacgacccttacgctgccaccgtgcaattgggcggcccatcgtgcgatggacaggcccaggccggtgcccccggattcagtacccggtcccgtcttgcctttgacgaagcggcggaaaatatcggaacgatcggaaggcgcaatctgtgagccgaaattgaccacattggtcacaatggtgccgttgtctttgtcttcatgcgtttcgaccagcaccgtggtgttatcgggggagtgcttgagcgcgttggcaatgatgttggtgaacagctgacggagacgatcctgatcgccttccatcgtgatgtcatcgctcacgcgcatctgaatatcatgagcatgcccgccatcggcgatttccaacggttcaacggtttcgtccaggaattcggcgacgttgaactgctcgatgttcagactggcggctccagcttccatacggctcagatccagcaggaaggcaataagatcgctcaggcgctgcgtctgggtaagaatgccctcaagattggctgacgtgggttcagtgaccccatcagccatgttctcgaccatcgcctgcaatgcagacaccggcgtgcgcagttcgtggctaacgttggcaatcatgtccagacgcattttgtcggcatgctctaactcttcggccatttcgttgaaggagcgcgcaagctggcccacttcatcatgacgttcctgatcgatgttcacacgcacggtgtaatcgccctcggccatggcttcagccacgtcacgcatctggcgcagaggtgcggtgatacctcgagaaaagaaataggtaatgcccagcgccactaccagagtcaggggcatggcaatccaaccggaccatccgaatttcaggagaaaccagcacatcgcgaaggcgatggcggtggcgcaaacgataagcgcactgagctccagcttgagcgaagagaacaaatcaaccggcttgacacgcttggtggcgttgtcgagccgggatttcgttgattgcggagatgccattactcggtcggcggttcgaaggcgtagcccacaccatgcacggtgcgaatcatatcggcgccaagcttatggcgcagggccttgacgtggctatcgacggtgcgggtgccagaggcatccacccagtcccacacctcttcaagcagcttctcacgagtgagcaccgacttcggacgacgtgccagcgtggccagcaaatcgaattcggtcggggtcaggtgcacctgctcaccgttgacggtgacgatgcgctgggccggatcgatgaccatggaaccgaaatcaagaatcttctcgttctcggaattcttggcgatgaccttggcgcgttccacgcggcgcagcagcgccttgcagcgggcgatgagctcacgcatggagaacggcttggtcatgtaatcgtcagcaccggcacccaggccaatgaccttgtcagtttcatcgtcacgggcggtgaggatcagcacaggaaccgggcgctcggcaacgatacgcttagtggcttcaagaccatccataaccggcagcatgatatccatgatgaccagatcgggcttgagctgcaaggcggcctgaacggcggaagcgccatctccagccacacgggcggtccatccttcagcagtgatgcgctgggcgatggcagtggcgagtgtcggctcgtcctccactaccaacaccgtgcgcggagccgtgttctgatgcgctgtggaattcagcatgaatagttacctttcagcctgttggctaattcagttctctggcttcaagaatacaactgcgagagctggaacggtgattttagccgagaaaggccttgaatggtattctccggcgtccgcctcgaacgtgccgttatggatgtcggaaccgccatacttggcatcatcggtggtgaacacttcggtccatttgccgccggtgggcagtgccacttggtagtcggaccatgcctcgccggagaagttgaccaccacggccagcgtctcgcccttggttccgatgcgcaggaagctcagcgtgttgtgatcggcatcgtcgctggtgagccactggaaaccggccggatcgaagtcctggctccacagtgccggattcgccttgtagaaggcgttgaggtcggccaccatggtctgcacctggcgatgatcctgccagttcaggcaatcccagtcgatggaggcatcgtgatcccactcgccccactgtgccagctcgttgcccataaaggagagcttcttgcccgggtgagcccactggtaggcgaacagttcacgcactccggccatcttctgccaaccgttgcccggcatcttgccatatacggatcccttgccgtacacgacctcgtcgtggctgatgggcagcacatagttctcggagtaggcatacaccatcgagaaggtgatttcattgtgatgccacttgcggttgatgggctcctcatgcagatattcaagggtgtcatgcatccagcccatgttccacttgaggccgaagccgatgccgccggcggaagtgggggcggtgatgcccggccatgcggtggattcctcggcgatcatcatcacgccggggttgttcttgtaagcggtggcggtggcctccttgaggaagtcgatggcctccaggttctcgcggcctccgtagatgttcgggcgccactgaccgggttcgcggctatagtcgaggtagagcatggagctgacggcatccacgcgcagtgcgtcgacgtgcaggtcctcaagccagaacagggcgttggccaccaggaagttgcgcacctcgcggcgtccgaagttgaacacataggtgccccaatcggggtgttcgccgcgcagcgggtctggatcctcgtacagcggggtgccatcgaaacggccgagcgcaaaggcatccttcgggaagtgagcgggcacccagtccatgatcacgccgatgccggcctgatggaacttgtcgaccaggtaacggaaatcgtcgggggagccgaggcgtgaatccaccgcgtagtaaccggtgacctgatagccccaggatccggagaacgggtgctgggccaacggcatgaactcgacgtgggtgtagccctcctgcttgacgtagtccaccaattccgtggctaggtcgcggtagctcaggcccttcttccaactgccggcatgcacctcgtagatggagaccgggccgttgtgcgggttggtggtgcggcggtgctgcatccaggcgtcatcggcccactcgtaggaggattcggtgatgatggatgcggtgttcggcgggatttcgtgctgacgctccatcgggtcggccttcatctcccacacgtagttggcattgaggatttggaacttgtagttctcgcctgcgccaagaccgggaatgaagatttcccacacgccggaggaaccgagctcgcgcatggcgtggcggcggccgtcccaggcgttgaagttgccgaccacgcgcacggcgtgggcgtttggcgcccatacggagaaggcggtgcccaccacttgttcgccgggcgtgccatcggcaccgcccattgggtcgtcatagcgcagcacatgtgcgccgagggcttcccagagcttttcgtggcgaccttcgccgaacaggtaggtgtccatttcgccaagtgtgggcatgtagcggtaggggtcatcctcgatgagcacgtcgccgctttcccattcggttttcacgcggtaatcgggaatggtgggctgcttcttggtccccgcggcgggaacggtggtcacgaatacgccgttgtattcgtgtgtcatcggatattcgccgtcttgggtgagaatggtcacggatttggcaagtggacgcagcacacggattgtggcggtatcggcatgcttgccaatgccgagatgcccgccaagaactccgtgggggttgtagaattcagcattgctcaccgcgtcgaggtcactttgggcaacaggcacggtgacggtatcttccttgatcttcgtttcattagccatgccccaaagtctacgtgcgttggtgtcggaaacgctacattggcgcgtcgaaaatggcgaatttatgccgcttagagtgttgtcgcctgattgtgagcgctctcattgtcccagtccagaccatatggcacaattattcgagtttttgtgagtaatccgtcagttctcggaggatacatgtcttatcaagtcggcgatatggtcgtctacccacgtcatggtgcagcaaaagtggaggccatcaccgagcggacggttaagggcgtgacgcgcgaatatctgcagttgtccgtactttcctccgacggtctggtcatcaatgtgccggtggaaaacgccaagaaagtcggtgtgcgtgacatcgtctccggttccgaggtagccaaggtgttcgagattctgcgaaccccgatcatcgaaaaggaaatgaactggtcccgccgttacaagctgaatgtcgaaaagatcgccaccggtgatgtcaataaaatcgccgaagtggtgcgcgatctcgcgcagcgcgacgtggacgaacacggcttgtccgcaggcgagaagcgcatgctgaccaaggcccgcgccatcctgacctccgagatcgcgctgtccgagaagatcgatgagacggaagcacagcgtctgcttgacgtgaacctcggctatgcacctgcccaggtgggtgatgaccagcatcacgctgctgagcctgaagaagcggccgcagacacgctggcgcgcgtcgaagccgaaaagaagtccaagaagaagtgatcctgcgcgtcggccagggctttgatgcccatcggtttgccgcttccggttccggatgtgaattatggttggccggactgtattggccggtcccagagaacgctgtaccggctgaggctgcccgatatgagggcatcgaaggtgattccgatggtgatgtggccgctcacgccttgattgatgcgttgctcgccgctgccggtctgggcgatattggttcactgttcggcgtgggctcccatgcgcatggtgccggtatgcacggctcggatatgcttcgtgaaactgttgcccatcttgcggatagcggctatcggcccgtctccgcgtccgtggccatcgtcggcaatcgcccgaaaatcggtacccgccgcgccgaggcggaagccgcgttatccgcggccgtcggttgcccggtatcggtcaccgccaccaccaccgaccatatgggttttaccggtcgaggtgaaggcatagccgccatcgccagtgctttggtggagcgtcgctgatgacggagccataagagaggagcccctttcccatgcggaaaggggctcctctcgttgagagtagtgcggagtgctactttcgcaacgtttccacagctttggcaagtgcccagaacagggtggacagcgtcacgatagtgaagcttgggggagcggggaacatcgcggaaagcaccagtccggcccagatggacaccaggcacagcacgctggcaatcaccatggccttgaacggcgagccggccagaatattggcggtggccgcaggcgtgattaccagagcgaaaatcagcagtgtgcccacagccggcacggcaatggtaatcacaccggccataatcgccatgaatgccacattcatcaggccaatcggcacgcctttggcttgcgccacctgctcatcgagcgagctgaacagcagcggacggtagataatcgccaagaggactagcagcagcacgtcgaacacggcgaagccaatgatctggccggtggtgatggtcaggattgagccgaacagaatggactgcatctgctgggaagccgagctggacagtcgtgcgaagaacagacccagaccggtggcaaaggccagtacggttccggtggcgatttcacgttcggagacgcgcttgcccaatgcgccgatgatcagtgcgccgccgagcgcgaacacgcccatgcccagcgagacgggcaggccgaacagcaccgcgccggtggcaccgggcagtccgatatgagccaatgcgtgagcggcgaaggtggatcgtcgtgcgatggtgaagtagcccataacgcctgcggccaatgcgatgcacaggccggcgatgaaggcattggtcatgaacggggcagatagcgtgctgagccattcgggatcatatgagaagttgatggtgctcatggtctttgatatctctgtgtctcttgcttcctcatgccgcggcttggtatgcgcggcgattctgtacggtgctgactgctgtgctagacgttattggtgcgcggtcgcggtatcggtgccgtgttcgtgatggtgcagctgcgccacttcggcggcggtatgcatatcctgcggctggtcgcgtggctcgtccggagtgggggtcacgaacatgtctccctgcggggtggtgaccacctgcacctgtgtgccatacaaatgtgtcagcagatcggaatcaagcaccttgtgcatatcggcgtaatgcggatggccgtccagcagatatacggcgccggtcagaatcggcaacagcatgttgagatcatgcgccaccacttggatagtcatgccaagttcgcgattgagtttggcaagcacatgtacggtggatcgttggctggccagatccagattggccaacggctcatcaagcatgagcagctgtgggtcgcataccagcgcctgggcgatggcgacacgctgacgcaggccgccggacagctcggacagacggtaatgggccttgtccgcgatgccggtgaattccatggcttcgtgtgccttggccttctgtgctttggtgacgggatgaatgccgaaccgtgtaccggtcagtcccagtagcaccgactgctcggcggtgagattggaatcgacgtcggaaacatagctttgcggcacatagccgatgcgtttgttcatctctccggccggcttgcccaatacggtcagggagccgtgcgagagaggcagcaggcccaactcggccttcatcatcgtggtttttccggtgccgttagtgccaacgatggcggtgaccgaaccggtggggatggtgaagttgccatgttgccatatcgtgcgatcgccacgcttgatggcggcatccgtgaacacgatgcatgcggaagattcgttcatagagctcgattgtggcaaatgatgctgacaatcgttctcaatatcgaatgatgcggttatgcggttatgacaaaggccatgcaaccgatgtcatatcggaagcatggccttcgcgcatatgcatactatggtcacagctcgccgccgtggaccccgatcatttgcccggatcagtttggccctcgttcgaaggagtggtgccttctgtatcggtggtggagttgtcggtcccgaagtttgctgaatcactggcggagtcggcgtttgtggccttgcattcgcggatatacgtggtacctgcatcgttggcggagtcggactggtttgcggcagtgtcggaggaattttctccggacgcatcgccttcggtgttgtcgccggtgccggcatcacagccgtaagtcggatccaccgcgtcaatgatggtgttgatgagctggttaatccaagcattcagcgtggtggcgtccgcgggcatttgctcggagacatcgacgaccggcacatcggatttgcctgcggtgccggtgatcatattggtggcatcgctggcttcctgcgtgttgttgatcaatacatccgcgcccttgtcttcaataagcgtctggaaagcctgcagatccgccggtgctggttcgccgccggaagccgtcgactgcgtatagcccttgggggttgcgtccttgaaccccacgtcggccatgagatagtaggccacgggttcggttgccgcgtacgtgagatcggtatgggttttggtgaagtcgttgacccaggtttccagtgttttttcgctgttcagccaattcttcagtcgcttctggaatattctcttcttgctgggcagagccttgacatatgcctcggtgatggcggaggccatgctcgagcgtgcgtccttggagaaccataggtgagggttgtcgccttccatggcgcccataacggaagcggcggaaaccaaggtggaacttttcgacaacggcttggtcgcccaggaatcatagccggcgccgttggccaccacgatctgtgcttgggatagtttggcgacgtccgaggttttcggctcgaaatcatgggcatccacattggtggagttcatgatggaggtgaccgtcacgtcatctccaccaagttccgcggccagcgacccccattggttgatggaggcgaccacgttgatcggaccggtgggctcgggtacgttctgcttggtgttcagctcggtttgggttgtggccgagccgcaagccgcggaagcgaacagcatgacggcgcctaggccggctgcggcgagtttcgtgagtcgtgtaatccgaatccccatggcgtgccttcttcgttgagatggacgaacgatataatcctgatttgttccaacgatagcctatcgtttcgatagaatgcgccgaacaatatggaagggtatggatgtccacgaaaatcgacggcaagcaggttgctgccacgatcaaagccgatcttgccgaacgtgtgaacaagctcaaggcgcaaggcgtggtgcctggactgggcacgctgctggtgggggaggatcccggctcgatgaagtacgtggccggcaagcatgccgattgccaggaggtgggtatcacctcggtcaagaaggaactgcctgccgatgccagtttcggccagattgccgaggccgtgcgtgaacttaacgatgacccggcttgcaccggatttatcgtgcagctgccgctgcccaagggcgttgatgaaaacgcgatcatcaacatgatcgatccggccaaggatgcggacggcatgcacccgtacaaccttggcgaactggtgctgcatgtacgcgcagacatcgcaacaccgttgccctgcaccccacgcggcgtgcttgaattgcttgatgcctacaacattgacctggaaggcaaggaagtgtgcgtgttgggccgtggcattaccatcggccgcaccatcggcctgctgctcacgcgcaatgccgtcaatgccaccgtcaccttgtgccacaccggtacgcgcgacgtggccgaccatatgcgccgtgccgatgtcatcatcgccgcaatgggctccgccggcttcgtgacccctgacaagatcaaggaggggacggtactggtggatgtgggcgtcagccgcgtattcgatgaggaggccggtcgctaccgtatcaagggcgacgtggacaaggcctgctatgacaaggcgtccgcatacacccccaaccccggtggcgtaggccccatgacccgagccatgcttctggccaacgttgtagaaatggccgagcgttcctcccgatgaggaacaggtgggccgggatgttctgttgccgggcgtaaagcttggcctgagcggcctggagcggtcccggcaacagaacgtcctagcccatctgtggtcaacgcaaattaaagcgtgcgacacacccgaatttttctaggaaatttgggcagagttgcttgtatcgtaaatatctgtatgtctgcgagggcatacgtataactgaatatcgagaaattatccatccactattagaaaccatatatttacatggcagagaacaacattgaagtcaccaaggttgccatcaacgacatcggcaccgaagaggacttcatcaaggcagtcgattccaccatcaagaacttcgatgatggtgatctggttgagggtaccgtcgtcaagatcgatcacgacgaggtcctcctggacatcggctacaagaccgagggcgtcatcccctcccgcgagctttccatcaagaaggacgttgatcctgacgaagtcgtcgaggtcggcgacaccatcgaggcccttgtcgtcaccaaggaagacaaggaaggccgtctgattctgtccaagaagcgtgctcagtacgagcgtgcttggggcgacattgagaagatcaaggaagctgacggcgtcgttgagggcaccgtcattgaagccgtcaagggcggcctcatcgtcgacatcggtctgcgtggcttcctgcctgcctccctcgttgagatgcgtcgtgtccgcgacctctccccgtacatcggtcagaagatcaaggccaagatccttgagctcgacaagaaccgtaacaacgtggttctgtcccgccgccagtaccttgaggagacccagtccgaggtccgcgagaccttcctgtcccagctcaagaagggtcagatccgtgaaggcgtggtgtcctccatcgtcaacttcggcgctttcgtcgatctcggcggtgttgacggtctgatccacgtttccgagctgtcctggaagcacatcgaccacccgtctgaggtcgtcaaggttggcgacaaggtcactgtcgaggtgctcgacgtcgatctcgaccgtgagcgtatctccctgtccctcaaggcgacccaggaggatccgtggcagcgtttcgctcgcacccacgttcccggccagattgtcaagggcaaggtcaccaagatcgtccagttcggtgtcttcatctccgtcgaagacggcatcgagggcctggtgcacatctccgagctcgccaaccgtcacgtcgagaacccggagaccgtggtcaagccgggcgagaccgtgttcgtcaaggtgatcgacgtcgatctcgatcgtcgccgcatctccctgtccctcaagcaggccaacgactccgttgacccggcttccgaggacttcgatccggccatctacggtatgccggccgagtacgacgagcagggcaattacaagtaccccgaaggcttcgacccgaacaccaacgagtggatcgctggttacgagaagcagcgcgaggagtgggaagcccagtacgccgccgctcacgacctgtgggaagagcacaaggagttcgtggccaaggaactggcaaatgcggccgagtccgctgccgccgacggccagaaccagaaggaagagaagccggtcgaggagacctccaactactcttccgctgctccggctaccggcaccctcgccgactccgatcagctcgccgccctgcgcgaccagctgctcggcaagtgagtttgccgcgaagctaacgcttagcgtctgaagaaacccggtccgagtgggccgggtttcttgcgtttcgggagttatccgccaatgactccccttcctgagggggagctgtcggcgatagtcgacttgaggggagttgcagctacgataggcaccatgatgcgaataggactgactggcggtatcgcagccggcaaaagcacagtggccgcacggttgcgtgagctgggcgcgttgcatatcgactacgatgccctggcccgccagatcgtcgaacctgggggagtggcgctgccgcagattgtcgccgaattcggttctgatgcccttaacgctgacggcaccatgaatcgccaatggattgccgaccatatctttggcaaggatgccagaacgggcgcgcgtgaacgccttgatgccatcgagcatccgctgatttacgccgaggcggcgcgtctggaacgtaagcatcccgaaacaatcgtcatcgtccatgacatcccgctgctcgccgaagtaatcgataccattcctttcactttcgaccatatcgtcaccgtcgaggcaccggtgtgcatacggcttgaccgtatgatcgaggaacgcggtatgagtctcgaacaggctgaagcgcgcatccgccaccagtccagcgaggaggaacgtcgggctatcgctgacatcgtcatcgactccacccatccaatacctgagatgctggcccaagtggatgaaatatacgtgggatggctcacacaaaatgaacggcactagagaaagtgtgaggcaaacgcacaatatcgctcaatcgcacattggaaggaatggcgggaatgagctgtttctcggggaattgtgttcgattgtcaaagcgaaatcctcacacttctcttattgagaataatttgctgtgaaccgggaccgctaagataaagcctcatgggattcaatatcgagcgtgcggacaagcctttcgtcgtcaaatcgccctatcaaccatctggcgaccagccacaggctatcaccgagctgtctgaacgcatcgaaaacggtgaaaatgacgtggttctgatgggtgccaccggtactggtaaaaccgccaccaccgcctggctgatagagaaactgcagcgcccgaccctcatcattgagcccaacaagacgctggccgcgcagctgtgcgccgaattccgcgaacttatgccggacaacgccgtcagctacttcgtgagctactacgactactaccagccggaagcctatatcccgcagacggatacctatatagagaaagactccaatatcaatgacgatgtggaacggcttcgtcatcaggccaccgcaaacctgctgacccggcgtgattgcgtggtggtggccacggtatcctgcatctacggcttgggcacgccggaagaatatgccggccgtatgctcttcctcaaggtgggtcaagagaccaaccgtgatgacctgctgcgtcaatttgtcgccatgcaatacaaacgcaacgacatcgccttcacccgcggtacgttccgcgtgcggggcgacaccgtcgaaatcatccctgtctacgaggaactggcggtgcgtatcgaattctttggtgacgagatcgaccgcatttccacgctccatccgttgaccggagacgaaatcgatgaggaaaacgaggttcacattttcccggcctcgcattatgtggccggtcccgaacgcatggaacgggccctgaaaaccattcgcgaggaacttgacgagcgtctggccgagctgcgcaagcagggcaaggagctggaagcccagcgcctcaacatgcgtaccacctatgatttggaaatgctcacccaggtgggtgtctgttccggcgtcgagaactattcgcgtcatttcgacggtcgtgccgccggtactccgccgcacacattgcttgactttttccctgatgatttcctgctggtcattgacgaatcgcatgtcaccgtgccgcagatcggcgccatgtatgagggcgacgcctcccgtaagcgcacgctggtcgagcacggcttcagactgccctccgcaatggataatcgtccgttgaaatggccggaattcctgcagcgcgtgggccagaccgtatacctctccgccacgccaggtgactatgagctgggactttcggatggcgtggtcgagcagatcatccgtccgaccggcctgctggatccgaaaatcgatgtgcgaccggtcaaggggcagattgacgacttgcttggggagatcaaggcgcgcgtagacaggaacgagcgtgcgctggtcaccacattgaccaagaagatggccgaggatctgactgactatctgctggaacgcggcatcaaggtcgaatacctgcattccgacgtggacacgctgcgtcgtgtcgaactgctgcgcatgctgcgtgagggcaaaatcgacgtgatagtcggcatcaacctgctgcgagaaggccttgacttgccggaagtctccctggtggcgattctcgatgccgataaggaaggtttcctacgttcctatcgttcactgattcagaccatcggtcgtgccgcacgaaacgtgtcaggcacggtaatcatgtacgccgatgagaccactgatgccatgcgcaaggccattgacgagaccgatcgtcgccgcgccaagcaaattgcctataacaaggagcacggcattgatccgaagccgttgattaagaaaatcagcgatgtcaacgacatgctggccaaagaggatgtggacacccagaccctgctcgagggcggttatcgcaatgcgggcaaggccggcaacacgcatctgggcgtgcccgtgctcgatcccaacgaagccgacaagcgtcatgaggaaatcctcaaggccggactgcccgcacaggacctggctgatttgattcgtcaactctctgaacagatgcacactgccgccgaacagctccaattcgagctcgccgcccgtctacgcgacgaaatccgcgacctcaaaaaagagctgcgtcaaatgactgaggcgaataagtaaacccgtcacagacataagttagtgtagggaatcatggcagaaaccccactcgcatttgaaatcatcacctttgtggtgcttgcactgttcttcatcgtcgacctgttcgtcattggccgtcgcccgcacgtgccttccaccaaggaatgcgtgcagcatatcgcgttcttcgtggtcatggcgctcatattcggtggattcatctggtttttcgctggttccaagccggccatcgagttctattccggctggctgaccgagtattcgctatcgatcgacaatcttttcgtgttcgtcatcatcatgtcgaacttcgcggtgcctaagcagattcagaagtatgtgctgtcggtcggtatcaccatcgcgttgattttccgtggtctgttcattctgattggtgcggctctgatcacccgtttcacctgggtgttctttatcttcggcgcattcctgatctacaccgcgctcaagttggtgcttggcggcgatgaggatgaggaataccacgaaaacggcatcatccgtgcgttgcgtaaggtcattaagattaccgacgattacgacggcgagaagctgcgcaccaccaagaacggcgtgcgctattggaccccgatgctcatcgtgttcctgaccatcggcaccaccgatgttatgttcgcgtttgactcgattcccgcaatcttcggtctgaccaaggacccgttcctggtgttcacctccaatgtgttcgcattgcttggcctgcagcagctgtacttcttgcttggcgccttgctcgacaagcttgtctatctgccgattggcttgtccgtggtgctgggcttcatcggtgtcaagctcattatggaggcgctgcacggcaatactctgccgttcatcaacggcggcgaaggcgtgcattgggtgcctgaagtgccaacatggctctcccttgctgtgattgtcctggcaatcggcggagcggctttggcttctgtggtcaagatgaagcaagtggaaagcgctgagaaggcctgaaatcatagggaaatcaacccctcaaaacccaatcggcgcaacagtgtgagcgctcacaacacaccggggaataaacttgtcatgagccggtctgcgctagtagactgggctgcggcaagtgaggcaatcgcgcctcgaaccaaaaaagaacaagaataggcaggcattcatgcgtaaagccaagatcgtagacaccatcggtccttccaccgaggattacgacaaccttctcaagctcgtcgaagccggtatggacgttgctcgtctgaaccgctcccacggcacccccgaagatcacctcaacgtgtacaacaacgtgcgcaaggccagcgaggccaccggccgcaacgtggccgctctcgttgatctgcagggcccgaagattcgctgcggttggttcaagaagaacgccgagggcgaggacaaggtccagctgacgctcggccaggaattcatcatcaccaccgacgacgttgagggtgacgagcacatcacctccaccacgttcaagggcctgccgggtgactgccacccgggcgacccgattctgatcgatgacggcaaggttcgccttgaggtcaccaaggtcgagggcaacaacgtgcacaccaaggttgtcgtcgctggccccgtgtcctcccacaagggcatcaacctgccgggcgtcgccgtctctctgccggctctgactgagaaggatgaggccgacctgcgctgggccatccgcaccggtgccgacatcatcgccatgtccttcgtgcgtttcgccaccgacatcgaccgcgcccacgagattatggatgaggaaggccgtcgtattccgatcgtcgccaagatcgagaagccgcaggctctggagaacctcgaagagatcgtcaagaccttcgacggcgtcatggccgcccgcggcgacatggctgttgagtgcccgctggaagaggtcccgctggccaccaagcgcatcatcgagctggcccgccagtacgccaagccggtcatcgtggccaccgaagtcctcggctccatggtgaactccccggtcccgacccgtgcagaggcctccgactgcgccaacgccgttctcgacggctccgacgctaccatgacctccaacgagaccgccgttggtaagtacccggatgtgaccgtggctaccatggcccgtatttccgcttacgccaccgaccacggcttcgaccgtatcccggagctcaagaaccttgacatgtcttccaccggcgctgtttcctccgctgctgtggatctggctgacaagctcaacgccaaggccatcgttgcttacacccagaccggttccaccgtgcaccgcgtgtcccgcgagcgtccggccgccccgatctacggcctgaccaacaacgagcacacctaccactggctggctctgtcttggggcaccgaagccttcctgctcaaggaggactaccacgacaagtcccgcaaggacctcatgatcttcaccgacaaggtcctcaaggacgccggcaaggttgttgacggcgacaagatcgtcattctgagctccgctcagggcgatcaccagccgggccgcaccgactccatctacgtgcacactgttggcgcttgcgactgattattcgctcgctgactagcacacgctagtagtagacgaaagtcccatccgattggatgggactttttgttgcgtagggagaggagtcgcattcgaggcgaattgcggctcttgtctcctcacttagtcattgagatgctgcaggctgccactcttcagtcgcagaatcgcgatcacggttttggcatcgagaatcgtgccgttgaccaccatttcataggcctcgtccaccgagaccagtcggacgtcggaacgaggcgtttccggcccgatctcctgacgagacaccggcttgagaccggtggcaaagaatatcgaggtgtgctgggtggaatagctcggcgtattcatgaaccgggtgaactgcgtgaatttgtcggcgtcgaatccggcttcctcggccagcttgcgcttggccacatcggtcgggcgttcggaaggattgttggcgtgcccagccggaatctccaatgtccaccgatggttggcaatacggtactgctcaaccaacggaatcatgccgtcttcggtgacggccaacacagcgacggtgtcgccgttgagttcctggacaaaatagcgttcaaacgagccgatctgattcgattcgtacgagacatgatcgacattgaaataatgcgtctccacgatttgcctgcgggaaatctccttgaccggagaaggacgccacgggtcaaactggcggtaggtttcgttgctcatatgccctcctaacagaagcggaacatcaacctatggcctattgtaggccgcggcgacacgcctgacgataggcaacactcgggtacgccgttagcgatgatgacggctatcgcgtgtcttatggcgggagagtcgaattgatatgctaagctctgcaagagtgctttggcacgccctcgtatcccaattggtagaggaagcagcctcaaaatctgcgcagtgtgggttcgagtcccaccgagggcactttcgcaaaaaggtcagactcaaataacgaccttcgcgaatcgcgaggggtcatttgtatttggtcacaatcggaaaagagggtggcatggctgcaaggaagaagtccgaggaaccgagcatcgacgtcgacgaggtgctgaccgacgaagaactcaaggctgtggccgaggaagacggcgagcctgctgagtgcaaaaccaagcccgagaacggcccgcgtaccgttgtcgtggccgaggacgaggccgtgaatcgtatggatttggtggccatgctcgaagacaatggttacgaggtcgtcggccaggccgccaatggcgaggaagccgtcgaactgacccgcaagttccgcccggacgtggtgtgcatggacgtcaagatgccgcgtatggatggcatcgccgccgccggcatcatctgcgacgagaacatcgctcccgtggtcatgctcaccgccttctcccagaccgatttggtcaagaaggccaccggtgccggtgccatggcatatgtcaccaagccgtacgaggaatccaagctcctgccgaccctcgaagtcgccatgggtcgtttcgctgaaatcaacgatcttctggacaacgtcgagcgcagcgaacgcaagcttcaggaaaccaccgatcagctcaaggagaccgaggaaaagctcaagaaggctgaggacacccttgaggaacgcaagcttgtggatcgtgccaagggtctattgatggacaaggccgacttctccgagcagggtgctttccgttggattcagaagacatccatggatcagcgcattcctaagaagcgtcttgcgcaggccatcatcgccaagtacggcgatccgaagccgtccgagaccgacgagcgctgagccaacaaacaaatgaaccgattaggggagaggccagcgtgaccgagcccaccaatgaaactttgctggtggtggatggccactcgctggcctttcgtgcgttttacgccctgccggttgaaaatttcagtaccgcagcagggcaagccactaacgcggtatggggctttgccaccatgctgtctcaggtgattgaagcggagaagccagaccatctaggtgtagccttcgatatgaagggcggcacgttccgcaacgacatgcttccgcagtacaagggcacccgtgaggccgcgcccgaggagctgctcacccagctgcctttgattcagcgcatgctcaaggccctgggcgtcacgtatatcgaaaagcaggggtacgagggcgatgacatcatcgccactctcgccactatgggagacgacgccggctatcacacgctggtattgtccggcgacagagatgccttccagcttgtggacgacaacgtcaccgtgctctacccaggccatcacttcaaagacctgaagcatatgacgcctcagtccatcgtggacaagtacaaggtcacgccggcacaataccctgatttggcggctctgcgtggtgagaccgccgataatattcccggtgtgcccggcgtgggcgacggatatgcggccaaatggatcaaccagtatggctcgctggatgccatttgcgaacacgcagacgaggtcaccggcaaaaaaggtgaggcgttgcgcgccaatatcgatcaggtcaagctgaaccgcaaggtcaatgcgctggtgcgcgacgtggatctcggtgtcgatatcgaggatctgacgttcggctcagtggatgtggcccaggttgatgctctcttcaaagagctcgagttcggtccgcgtaccaagacccgcgtgatgaagattttcaatggtggcgtgagcccagctggaaccgcccagggagcagcggccgcacagtcggatggtcctgcagaagacgagctgggttccggtttggacacaccgaaaatcacggttattgaatccgcggcacagttcgagcagtgggtcgaagcccatcgtcatgagatcaatgttcctgacgacattgttgatttcccggtttccgattacagcaatgaggccgaacgtcacatcatgtgcggtgacgcggtcggtcatgcctggacggtgaccgcatggggagacgcgcggcccgggcgcgcccatgtgcaggcatgcgccgttgctacggcatcctcagcagccattatcgaggctccgatggcatcatcagtgcagaccgctcttgatcggttcctgaaagccgagcatttccgtaccatcgtccacggatacaaggaactgcttcacctgctttctgccgccggattgggcatggcattgccgatgttcgataccaaactgggcggataccttgcccagcctgacttccatgccgacaatctcaatcaggcagccgaacacttcctggatattcatgttgtcgatgccgagcagccggcccaaggtgtgctggatttcgacgacgaacacaccgaggaagacctgaacgaacggcgtgtgcatgatttggctgttatccgcgaactggccgttactttggggccggtcatcgacgagcgtcggcaatactggctgatgcgtgccattgagctgccggtttcccgggtgctgcacggcatggagcattcgggggcaaaaatcgaccgttccaggctcaccgacatgcgtgaccggtttgccgccgatgcccgtcaggcacaggaaatggcatggcagtatgcaggtggtgagatcaatctgcagagccccaagcagttgcagaaggtgctgtttgtagatatgggtttgaagcccaccaaacgcaccaagaatggctcttacaccaccaatgcggcggcattgcagaatctctacatccattccgtggataatgagcaggccaatggattcctcggggcgctgctgcgtcatcgggaaaccaataagcttaagcaaatcgtgcagacgcttattgatgccacgaataaggcagacgagcgtatccacactacattcgagcagaccgtggccgccaccggccgattgagctcggtggacccgaatctgcagaatattcccaaccgtaatgcggtcggacgtgagattcgtagtgtgtttgtgccgggagaaggctatgaggcgctgatgagctgcgactattcgcaggtcgaattgcgtattatggccgatttgtctggcgatgaggctctgatcgaggcattccgctccggtgcggacttccataaatatgtggcctcgatggtctatggcgtgccggtggatcagattaccggtgaccagcgcagccatgtaaaagccatgagctatggccttgcctacggattgagcacctatggattggctcagcagctcaacattgcgcagcgtgaagccgaggccctgaaaaaccggtatttcgacaccttcggcaaggtacacgactaccttgaatcattggtagcgactgcccgtgagaaaggctataccgaaacgattttcggccgtcggcgctattttccggcgctgcgttccacgaaccgcatggcgcgtgacgctgccgaacgcgcagcgctgaacgcgccgattcagggttccgccgcagacatcatgaaaatcgcgatgattcgtgccgggcaggctctggacgaggccggtgtgaagagccgcattattctgcagattcacgatgaacttgtggtggagattgctccgggcgaaagcgagcaggtcaccgagctgattcgcaatgccatggaacatgccgtcgatcttgccgtgccgctggatgtgtcctgcggtatcggatcggactggcagctcgccgcccactgattcgttgccggtttcttttgccgcgcagtatgagttgccctcccaccgagggcaaccattaccgtagcggactgcggaaatttgatgaagggtgcccgcaaaccgcaatcgctgtcatctccactacaatgagacctatgccgaatctcaagcaagttatcgacgttctcgagaccctgtatccgttgcgttacgccgaggaatgggatgagccgggcctgattgtgggcgatctaaaccatgaggtgaatcggattgtcttcgcggccgacccgacctcggccatagtggataaggccgttgccaccggcgccgacctactcgtcacccatcatccgttattcttccgatccgtgcatgaggccagcggacttggtttccgcggcgatattgtccgtcgcctgtaccagcacggttgtggattatgggtgggacatacgaatgccgatgccgcataccgcggcgtgggacaggccgcagccgattatttcgggcttgttggctcgcaaccgcttgtacccatcgaagatacggcggccgcgcatccggtcgggcttggacgtgtgggtcgtttgccggagccaatcacgctcaaggattttgctcagcgcgtattcgatgaggtgagtgaccatggcatggtcactgccctcggtatccagatgtgcggcgatccagaggctctggtgcggcgtatagccatcttgccgggctccggtgattccttgttcaatgaagtgcgcgcgacaggcgctgatgtatacgtgaccagcgatttacggcatcatccggtgactgatgccattgaacaggcgcgctacgaggcacgaatgcgcggtcaaggcattgccctcgggcagggggagagcggtgatgggcatgtgcgtccttatttcatcaacacaccgcatgctgccatcgaatccatgtggttcaattatgcgcttgaggatgtgcctgttgccgtcgaacgggcgacaggttctcgtcccgaggttgaatggttccgcgacacgactgacccatggacgctgtccatcacctcccgtcaagactgagccactacagtagggtattgaaaacgtttgcgaaggagaggcatgtttggcgaaagcaagcgggaacaactcgagcgccggcttgaccataagctgaacgctacttctgacggtatcgacatggatgtgcccgccaaggtggtgagcagtgaaaccgtgtataccggccgcatcttccatgtggacgatatgcgtattgcattgaccgacaaaggcggcgaagaacatgaaatcagccgtcaggtgttgcgccacgcaccttgcgtagtaatgctcgtgcatgacatgtccaatgaccgataccttatcgaacgtgaatatcgtgctggttcgggcatgttcgcctatgggctgcccgcgggtcttatggacgagggcgaggatgtgcttgacgccgcattgcgtgaattgggtgaggaaaccggagtggttcctgactgtgatgtcatgggcgtcgactatgtcggtgacttctattcctctgagggcatgaccgacgagttggctcacatcatggtgctgcatctcggtccgttcaaacatgagccacggcatttcgatccggatgagcatgtggagtccgcatggattccatggagcgatctggccgccacgcgcatcacctcctccaattcaatgatcgccatccagcacgaggcgctgcgcaggctcctcgccaagaattccgacaaagacaagccgacgttattctcctgacgttcaccgtgcccgaacatcggtaacacaagaaagtgggatactgaagagtatgcagatcagaccaggatcaatgtatccgctgggtgccagctatgacggcgccggtgtgaatttcgcgttgtactcgcaggttgcgcaaaaggtggagttgtgtctgttcgacgaagatgatgcggagacgcgtgtcgagatgaccgagcagaactcctacgtatggcataactatattcccggactgcagcccgggcagcgttatggttaccgcgtctacgggccgtacgacccggcgaacggtctgcggtgcaatcctaacaagctgttgcttgacccatatgccaaggccatcgaaggcaatatcgacggcgacgaaagcctgttctcatactggttcaagagtccggacgacaacacggcgatgaacgacctcgactcggcggctcacaccatgaagtccgcggtcatcaacccctacttcgattggggcaatgatcagcatccgtatattccgtaccatgattcggcgatttatgaggcgcatgtgcgcggcatgaccaacctcaacatggatgtgccgccggatatccgcggcacctacgcgggtctggctcatccgagcgtcatcgaatatttgaaaaagcttggcgtcaccgctattgaactgatgccgattcaccagttcgtcaacgactccttcctgcaggaaaagggtctgtcgaactactggggatacaacaccatcggcttcttcgcacctcacaacgcctattcctcttccggggaacgcggcgaacaggtcaacgagttcaaggccatggtcaaggcatatcatcatgccggcatggaggtcattcttgacgtggtgtacaaccacaccgccgagggcaaccatatgggccccactctgagcttcaagggtatcgacaacgcctcctactaccgactggtggaaggtgatcagcagcactacttcgacaccaccggcaccggaaactcgctgcttatgcgctcgccgcatgccctgcagctgatcaccgattcgctgcgctactgggtcaccgaaatgcatgttgatggcttccgcttcgatctggccgccacgctggctcgccagttccaggaggtcgacaagctgtctgcgttcttcgacatcgtggaacaggatccgatcatctcgcgcgtcaagctgatcgccgagccatgggatttgggctcaggtggctatcaggtgggtggcttcccgtccagctggtccgagtggaacggtcgctaccgcgataccgtgcgcgacttctggcgctcgcaaccgtccactttgcctgaatttgcttctcgcctgatgggcagctccgacctgtatcaggtcaatggccgccgaccggtggcatccgtgaacttcatcaccgcgcatgacggcttcacgatgaacgatctggtcagctacaacgagaagcacaatgaagccaatggtgaaggcaaccgggacggtgagagcaacaatcgttcctggaactgcggtgtggaaggccccaccaacattcgcgacgtcaacgaattgcgccagcgtcagatgcgtaacatgttctccactctgctgctaagccaaggcattccgatgatctgcggtggcgacgaagtggcccgcacccagcagggcaacaataacgcgtactgccaggataatgagatttcgtggaccgattggaatctcgacaagaaccaggaagagcttcttgcgttcgtctccaagctcattcatttgcgtttggaacatccggtgctgcaccgtcgtcgtttcttcaccggccgcgaaccgggcgacgactccaacacgattccgcaggtcgaatggtttgaccacaccggttccatcatggatatggacgattggcagaacacccatgcgttctccatgatgatctacctgaacggatcggatattcccgaggtcgactggtatggcaaccggatggtcgacaacgacttcatcctgatcttcaacgcgcattacgagccgatcatgttcactctgccggatgagcgttacggccgtaagtggcagctggtcgtggatacgcacaacccgaatgggccggaactgagctatgaggcgggcttcatgatcactgcccagtcccgcagcttcctcatgctcatgagcgccaaaaagcccaagaagcccatgggcctataaccagaccgaagttaagctccctctgacgatagagctcccggtgtagccgggtgagggagagaccggagcaaagccgcgaacctctactcgcgccccttacgctcctccacgagccgagcatccccgagcgcaagcggatgcttgccgacaagcgggcgtggctggtcgaacagcttgcggaaatccaggattccatcgacttcatcgacgccaaacagcgcttctacgacaacgtcctatccggcgcaaccccatacgtgagcgtgcttatcccgtccgccgcgcttgcaaaggagtcagaggaaccgggagaattgaagggtgcggagaggaaataggttcgaccgagccgtttcttcctccgggatgcaagcgcgaacaacggtttgttgtacccgcgcttggcgaacgggccatgcccttagactggaatcagcaagcgcacagcgaggcgctcgaatcgttttccgatgtcgggaggtagtcatgtcgatcggtcaggttatcaaagtcgttcgcgaggagcgaggtcttacgcagtcgcagttcgcgcacaagctgttcgtcacccaacaggcgctttcccgctgggagaagggaacggcagagccgagcatcgacatgattcggcttatcagcacccgttttgaggtgccgatggcgaggcttatggagatgccggacaacggtttttgccaaagttgcgccatgccgttctatcgcccggaagaccatggcaccgaaccggatggaacgcgaagcggagattattgcaactactgctatgacgacggcgtttttcttcaggactatgccaatagcgatgaattggtcgccgcgtgtgcgccgatgatggcggaatcctgccatatcagcgtcgaacaggccgaggattgcatgtcggcgctgctgccaaacctcaagcggtggcggcgtcaggacgagatcgatgcggtggcggaaggggaatgagcgatggcgttcgattataagaaggagtataaggacctgtattggccgaagaccatgccggccatcgtcatggtaccggcgatgcggttcgtcgcggtggacggtgtgggcgacccgaacgaagaaggcggcgattacgccaaggcgatgcaactgctttacggcatttcgttcaccgtcaaaatgagcaagaagtcaaagaacccggccgagcatatcgacgggtacttcgactacaccgtgcctccgctggagggcttatggagcatgggggagggtgtgtccggcgtcgattacgcgcacaaagccgacttccattggacttcgatgattcgtctgccggaattcgtgaccgataaggtctttgcgtgggccaagacatcgtttgccgccaaacacccggaatccgacgtcaatcgcgcatatctcttcgatttcgatgaaggcgtggtcgcgcaggtcatgcacaagggcccgtacgacgacgagcccgcaaccgtggcgattctggatgactacgcgcgctcgcaaggctacgagctcgacctctccgacgcccgccgacatcacgaaatctacatatccgatccgcgccgagcaaaaccggaaaacctcaaaaccgtcatccgtcatccggtagtgaaggtgggttgactttcggcgaactgctcgaagcgctcaccgcgcagtagcgcaaacaatctgccggaatcctcaccgtggtcaaagagcgctaccaagaactcgataagcaaaataactagaagcactggttcctctcggagagattctgcccgagcgaccttatgaatccggcacaggtcatctttcccggtgcaggaagcatccaggctcatgtgcattgatgacgccgatggattgcagataggcgtagacgatggtggtaccgatgaatcgcatgccgtacgtcttgagatccgctgcgatggcgtcggacagaggggatgtagtcatgcctgtctcgtagatgacgtgacggccggtgaaccgccaaatatagtcgtcgaaaccgccgtatgacgcctggatatcccggaatgcgttgcaggtattttggtgtcatttgagattgggaagcggaaatcgatgtcgcatggaagcgaactgactagcaggtggggtcccaacatcacaaaagtcccttagaccgcaaggccgtataggttctacggtcatcggataaaatcggataaatcgtttagcggccggataaaagaagaagcccagaatcgttgagattccaggcttttttgtttgtcgggctagcgggatttgaacccacgacatcctgctcccaaagcaggcgcgctaccaaactgcgctatagcccgatacgccattaaggcacaaggaattattataaacgacgctggatacattgcgtgtcgagcatatgaattcaaaaaggttccggattctcttgatagcgtatgagcgacatctttatacaatgatgctctacaacgactaggtttgaatctgcatctgctatttctatcaaattcagtaacaacattcatgaggatgttgcgagtcgtcacgtattttggcataataaacagtgctttggcccgcaagggcgaggctccaagtcgccgggggtattcccccggcattccttttcctccaatgttgtcaggagcccatttgagagaattgagcatcttcgcggacgaatctggcgagtgggggttataggaactaaacgtggtgttttagactctggtttccttggtcctgaggtggcctatgagggctcttatgtcaaatgccgggctccggtcagcacggccgcgacttcgcgtggcgaggttgttgcccgtccatcgcgtgggcctcgatcgatccggtggccgcgtcgccgagattatggatggccttggcggaggcaacgagggcgtcgaaggcgtcgggaatcagagacgggtctccacggagtgcatccgcgacggcgagggtgatcaggacggccgcgcgggccaggcccgcggtgagtgcgaaatatcgtttcatgcgcgggggtatgcgtcacgtccgagggaggcgtctcgcggatggcgctattccgccgaacacgccgtgtgagcgggcggcatgccgcgctaatcacccgatccccaggggacgtgggcgtggaattcgtcccaggcgatgccggtgccgtattccgggaccccgacgccgacgtcgtcggcgcttccggccgtggatgccctcgccggcttccgttgttcgggacggatgagcgacgatggcttcggattgcggcttttcatgtagcacatccattcgcaggcgcgtctcatgtgctcctcgggcaggccccgatggttgaggagcatgcgtttgagcggcgagttgacgccgccctccaatcggttcgtggtgcgcgccaccgggccgacggcggtcagtgacgggtcgaggaacgcgaacagcctgccctcgcggaacagcttttccagtcgccgatagcagcggcgcagctcctggtgggtccaccaccattcctgtttggatgccttcgggttcgcggggtcgtccctcgcataggtgcgttcggcgatgaagtccctccaccggatgtgccacgcgttgagcgcctcgccccaccgggccgccgcctccgtatcacgcacggcggtcagcttgtcggagagtttcttgagttccctgccggcctcgagcctcggccgcgaggtcaggtcggtcctcgtgttgcgctgcacgtgcaccagacagcgctggatcctcgtgtccggccacgtctcccggcatgcgctctcggcgccgcgcagcccgtcggtgatcagcacgtccggcgcggggatgcgcgaaaacagcgccatataggcggccttcgactcgttcgagcaccactggatgcccagcacctcgccgctttcgccgtcgatggcgacgatcaggcaccaatcgtggttcatgtacgtgccgtccgccatcaccgtgtgatgtctcgccgagcacggcgggatctcgggccggatgccccagcaccattgcacgcgtttgcggaacatgcgcgagcccgtccccatgtcggcctgcctcctgccggaaagcagccatccgaggaagacgcgcaggtcggcgtcgagtctctcgtcgggtctcggaacggtggccccaagcgaacaggccacgcatttccaacgctgggagccggccctcgtcctgccgttcttcctcatcgccccgccgcagaccggacacaaccgcgcccttttcgatttcgtcctcatgcgcccatggaacaggcaaagaacggcagaatcacggatctttaatacgacgtcacattaaagccaccccaacacgcctactcccgcaaggccaaacccggaacataaacaccacgtttagttcctataacccgcgagtggggttgttgcctgttactgaactgttttgttttcttaagtaatcctatgttataataaatctcatgttggtaaaggaatgggccagactggaaggattgcatccgcagaccgtgtggaaatggtgccgtcagggcaccatgcccgttcctgtggaacagacgccgaccggcatgtggctcatccacgacccgaaatacgagaccatgccgcaatcgaaaagcatgggaccccgcaccgtctgctatgcgcgagtatccagcggcgaccaaaagaacgacttgcaacgtcaggccgaccggttgaaggcgttcgcccttggcatgggagtagagaagccggaaatcgtcacggagacgggttccggcatggacgacaggcggcgcaggctcaaccggctattgtccgacccgaccgtgggcacgctgatcgtggagcacagggacaggctcgcccgcatgaacgcggggctggtggagagcgcgttgaaggcgcagggacgccgaatcatcgtggtggacgacatggagccggacgacgatctggtgcgcgacatgaccgaggtgctgacctcgttctgcgcccggctgtacgggcgtcgcgcggccaagcgcaagacggacgcggcgttgaaggcggcgcgcgatgcttgaggcggtcaaggtggcgctcgacccgactccgcggcaggaacgattgttggaatcgcacgccggggcggcgcgattcgcctacaacaatgggctggcgcacgtcaaggacatgctcgaacgcggcgatacccccgaatggtcgtactatgccctgcgcaggtggtggaatcaagccaagaacacactcgccgtggacgagaccacgggagaaccatggtggcccaggaacagcaaggagtcatacaacagcggcctcgaatcattggccgacgcgctgaagaacttctccaagtcccgcaaggggcgacggaaaggccgcaggatgggcttcccacgcttcaaatccaaggacaaggcggttcccggattcgcgtacacgacgggctcgtttggtctcattgactgtgaccctcatgcgctgcggctcccgaggataggccgcgtgcactgcatggagaacgtgtccaggcgagtggacggcgcgaaggtgctgcgcatgagcgtatccaagcgtggtggacgctggcaggccagcctgaccgtcgaacgcgccgacctgccgattccatcgccgccgaaaggcgggagcgtcggcatcgacttgggcgtgaaggagctcgccgcattgtcggacggcaccgtgatacacaacccgcacgcactcaaatcgaacctcagacggttgaagaaagcccaacggaatctgagccgcaaacggaaaggctccaaccgccgccgcaaggcgagagcgcaggtcgcccgactatacgcacgggtggcggacctgcgttcggacgcgctcaacaagaccaccgccatgctcgcccatacctacgcggacatcagcatcgaggacttgaacgtggcgggcatggtgggaaaccacgggctcgcccgatcgattcaggacgccgcgttcgcggagttccgacgcctactgacctacaagaccgcacgcgccggcgcgaggcttcacgtcatcgaccgctggtatccaagctcgaagacctgctcgaactgcgggacggtgaaagccaagctgcccctgtccgagcgcgtctaccattgcgaggagtgcgggcttgtcatcgaccgtgatgtgaacgcggccatcaacatccaagtcgccgggagtgccccggagacgttaaacgcgcgtggaggaagcggaagacagacccgccttgagtgcgggacaatgcggcatccggcgaaacgcgaaccaagcggcggcgagggtcgcgtgaggcttggagctggtctcggcaacgaggccatgcagatgacttcgctctagcgacaagctaaaacaaagtcatctacaacggtaagctgtccgaatactatctcatcacattggtgcttcacgtccagtccgattctgtagcggaacatattgataagtatgaacgccatctggctgattcaggcttgcctgatattccattccatgctggtccattgtttaatgggcatgacggttacgaagacatttcatttgcggaccgtaagcggttgttcttcgcgttcttcacgctcgctcgtaaccttccgttccgatatgtgacattcgcgcatctcaagaccatgtttgatggcaacaaaatccgatttgaggctcagctcaaacgtgacttagccgacttcttcctgtcgcatctggacgaattccagtcgtacgagataatcaaggtgtattacgacaatggtcagcagattgttgcaaatgcattgaagacttctatcagctatgcgctgtctaaggaggccgttgtataccgtgatgcacagccaaaggactatcgtcttgaacaggcggcagatctgatgtgtactgtcgaactgactgcgttgaagttcgataaaggcacggaaactgctactgatcggaaaatattcaagaaccggagagacttccgcaagaactatctcaagattctacgtcgcaagcaattctgaacatcattacgggaattacaagatttttgtagtgtttcagattttcagtagaatggcgacagccaaatcccgctggcttgctagtaaagcgttgtcctcggggggagctttgtttgttgttgaaagataacgcggtatcgaatagataggggaggaccggcatgggatgtcaccaacgtgcggaaacctccggcctcatctcctttctgatttgtgccgtcgtcggcgcggtgtccatgaacctgtacctgcaattcgcgccggccatctggcagctgacccaacgccgtttcatggtgtgttcgggcatcgtggccgcgtgcggtgtcatctcgttcatcatcggatacgccagcaagtcacgctcgctgaacctcaaacacggttggctcgcgccgattcgtcgcatgttcgaaatcatcgctttgtcggtggtatacgcctcgaccatcttcctgtcttcgttcgccctgatcggcgcggccagtgacatgatgggcaaggcactgttctccggctatctttccagcgtctgcgcggccttcgccggcgtggtggggtatatgaccttcgtgcaggcggagatgatgaatgccaaaaccatcgccagcctgttgccgttcttcgtcatctccggcgtggttaccgccggcatgaccaccgacgatccatactggtatcacaacaatttctcccagctgggcgaccgcaccacattcgcggcacgcatgttcaactccacgctgattctggccggcacgtgcatcatcatcgtcagctacttcgccatctccgagctggtgaccaccgaacggctgcagcgcctgtggcatgaccacaccaaagccgacccgaaccgcggttatgagatttcgcatttcatgttccgtatagtcgtcctgtccattctgctgaccgtggccggcctggcgttcatcggcattggcgtgttccgctatacaccgcacaatctgttgcacaacatctgcgccaaaggcctgccgtttgtgatgttgctgctgtttgtcctcctgccatggctggcgccccgactgtccaaagcggtgatggtggcctccgatttggctgcactcgtatgcgccgcattctgggtcaatatgatgatggggcacaacacgcttaccaatgtggaggctctggctggactggcgttcctcggttggttcatcgtgttctctcgtcaaatcgctgccatcgaagctgatcgtattgccgcgcagctcttgcatgcccaagccatcgaaggtggactggaacagcccgctgctgaaccggaacagcaaattgaatctcgcatcgctgccgaccgctgagcccattcatttgctagatttggccttatgactgaacaactctcgaatctctggcctgcgccgcttgctacacgaccgttgaacgccacggtgacggtaccgggcagcaaatcgttatccaatcgttatctgatacttgccgcacttggcaatgaacccgtcactttggtcggattgctgcgttcgcgtgacaccgacttgatgatgggcgctcttgaagcattgggcgtgcgatgcgatgtcgataccacaaccgacaccaccgtaacggtcacaccgccttcatccggccgattcaatggcaacgttgatgtgttctgcggcttggccggtacggtgatgcgttttgtaccgggactggcactgttcgccgatgggccagtgcatttcgacggtgacgaacaagcctacgcccgcccgatgaggccggtgcttgacggtctgaagcaacttggtgccaagatcgaataccacggggaagtcggacgactgccgtttaccattacaccgccaaccgagcttccgactgctcaggctcgggtcagtatcgattcgtccggttcctcccagttcatctccggcttgctgttgattggttccaaactgcctggtggattgagactgacgcacacaggagaaaagaccccgagtctgccgcacatccgcatgaccgtggccgatgtgaccggtgcctgcggtgcaattgaagccgatgagtccgcccgcacatggacggtcgtgcctcgcgcgatacagctgtcggataaggtgactgtcgaacctgacttgtcgaatgcggcgccattcctcggtgcggccttgattgccggtggtacggtccgtgtaccgcattggccggaaaccaccacccagccgggcggtctgctgcctggatacttggagcaaatgggtgccaaggtatcgttcccgacgattgacggcgtgcgctattgcgaagtgaccggcgatggaactgtacgcggcctaggctcgtttgatctgaccgcagcgggagagattgcgccttcgctggcggcgattctggtattcgccgataagcccaccgatatggtaggtatcgggcatctgcgcggccacgagacgaatcgtctggaagccttggtcaatgagattcgccgcatcgggggagtggccgaggaattgcccgacggactgcgcatcgagccagtgctgtctgagacactgcatgaggcgaatatggaaacctacgccgaccatcgtatggccacgtttgccacgatgctgggactgcgcattcccgatattcaggtcattaatgtggccaccacgcgcaagaccctgcctgatttcgttggtatgtggaacgggatgctggcataattcagctcccttcagtccgctgcgcggacagctaccctcagggagggagccaagttaaagagtccggcgcccctctttaagaggagccgtcgccggaggcggccgaggggagtgcgacgcatcgggcaaatcacggcattacaaatgagtgtggggctgattccggttggaatcagccccacactcgtgttgcaactagagactagttaatgccctaacggcggccactcacttggcgaaagtgttgccgtaggtgtcggtgccggcttcggcgattgcggcggacttgcgggcgatggccagctcttcgttcgtcggaatcacggcgatgatcacggaggagtccggagtggagatgatgcgcggttccttggaacgggtggcgttcttctcctcgtccagcttgacaccgaacggagcgagcttgtcgcacaccatcttgcgcacgatgtcgtcgttttcgcccacgccagcggtgaaggtgatcacgtcgcagccacccatctggtaggtgtagttgccgatgtagctgacgatgcggtgcacgtagacgtccagagccagcttggcgtcctcgttgccttcgcccaccagacggtggacttcgcgcaggtcgccgaagccggtcatgcccatcatgccggaacgcttgttgaacagggcgtcgagctcgtccacgttcatgtgggcgttgcggatcaggtggaagaccacagccgggtcgatgtcaccggtacggccacccatcatgaggccctcgagcggggtcagacccatggaggtctcaaccggcttgccggagacttcagcggaggcggaagcaccattgccgatgtgcagcacgatctgcttcaagccctcggccggcttgccgatgacgtccggcaccacggaggagatgtactcgtgggaggtgccgtgagcgccgtagcggcgaatgtggtactggtcggcgatttccttgttcagcgcataggtgctggcggccttcggcagctggaagaagaaggaggaatcgaacacgaagatctgcggaacgtccggcagcagggagcgcatgacttcggcgcccttggcctccgggccgttgtgcagcggggcgagcacagccagatccttgacctggttgatggtcttgtcggtcacgagggccggcttcgggaagatggaaccgccttgcaccacacggtggccgacagcaacgatgccggcgtcagacagtttggggccgtactcctcaaagaagccgagcacgcgcttcaagccctgctcgtggtcgtggatcggctcttcaagctcgtgcttctcgccgttgtactcgtgcttgtagtggccgtcgaccggctcaccgatcttctcgacgagaccggaagcgaggccttcgccggattcgagatcaaccagctggtacttgatcgagctggagccagaattgatgacaaggacggttttcgccattgtgggcatcctccattgtgaattgaatgttcccgtggatacacgggttaccgttgattagattactcgttgcttgctacaaaatgtggcattacagcggctcccctcagagaggagagccggagtcggaatcactgcgcttcgatggcggtgagggcgatggtgttgatgatgtcctgcaccagggcaccacgggacaggtcattcaccggcttgttgaggccttgcagcaccgggccgatggccagcgcgcccgaggagcgctgcacggccttatagccgatgttgccggcgcacaaatccgggaacacgaacacgttgacgtgtccggccacatcgttgcccttggccttggtggcggccacgttgggcgaccaggcggcatcgaactggatggaaccaaccaccggcaggtccggtgccttctccttgagcagcttggtggcttcctcgacaatatccacatccgggcccttgccggagccgagcgtggagtaggagagcatgccgaccttcgggtcgatgccgaaggcacgtgcggtttcggcggattgcagcgcgatttcggagagctgctccgcatccgggttcaggttgatggcacagtcggcaaacacggccacgtgatccttgaagcacatgaggaaggcgccggaaacgagcttctgacctggcttggtcttgatgacctgcagggccggacgcacggtgttggccgtggaattgatggaaccggagaccaggccgtcggcgtagccgagcaccacgagcattgtgccgaagtagctggcgtcggccagctgcttgcgggcctgctcttcggtcatgcccttcttggcgcgcagctcgcacagcttggcaaccatgggcttcaagacgttctcgtcatccatggcctggaaacgggcgcggtccaggaacttgagaccgagctcctcgccgcgggccagaatggcattcttatcgcccacgatgatgagattcacaatctcacgctcgagcaggtagttagccgccttgataatgcggtcttcctcgccttcaggcagcacaatagtcttcttgttgctcttggccttgccgagcaggtcgaactggaaggcatacggggtgatgggtgcggtgttctccacatcgagcgctgcgaacacttcatcggtgggggcgttcttgcggaaggtctccagcgccagatccttggtggattcgtcggtgaacggaatctggggcagcgtccagacgggcagaccgtacttggcgagggtttccttgacggagaaggcgtggcgcggttcacagccggtcacgaaaatgccgagcaccttgttgccggcggcttccatgccctcgatggacagatgcacggtctcgtccagctcgtgcggccagcggtcgatggtgcacacggccaggaacacgccggccttcaggtcggcggccacattcgcattgaattcgtagctggtcggatcattgacatgcgacttgtcggtgccgacgatcagtgcggcatccgcacgggacacatccatggcgtcgttgaaggcaccgacgatgtcaccacgggcggtgcccttgtcggtgcgcaccttgtgcacgtcaagtccggtagacagagccacgccaaggccagcattggacgcggcgagcagaatgggggtgaagtcgtcgtggttggacacggccggacggaacaccatggtcttgtacttggaagtcaatgcattgagcacgccgtacgcaacgacgttgcggccattagcgccttcggggctggcgatatatacacgggtcacggtcactgtgtctgtctcctttgatgtgcaacatatgtggaaccatatctcattgtagtggtcgttgttatcgttcacggtgttgtgtcgcggcgggatgcccgaagacaaggcccagcattgccatcgaatccagcaaaccatacgaaatcggcaataacgcagtgaacagagaaaacaagaagcgcgagccttgatacgactcgcgcttcttgatttgcggcaattcctcatacaaggaaccgccattgggttcccccacctggactcgaaccaagacaaagggttccaaagacccgtgtgctgccattacaccatgggggagcagtgagcttgcgcccacaagtgttcatttataccacacggctggaattactgaaagcccatgccatgtcgttcgcgtcgcttcatgaaaaagcaacaggactcacgcaaagaggaatccttgaccgtgatgttcggggtaagtgtcgaacagttcagccaccgagccatcctcgaataccgcgcgaatggcgctggcaagcaagggggcaatggacagtacggtcagaccgtcccagcgcttctcgtccggaatcggcacggtgtcggtgagcacgacctcgcgtgcgccgctttccttcagccgatcgattgccgggccggacagcacgccatgggtggcgaccacggtcacggacttcgcaccggcttcctgtagcacgtggcatgcgcccgcgatagtgccggcggtgtcaatcaaatcgtcgaccagcacgcagtccttgccagccacgtcgccgaccacacggttggccacggcctggttcggacgggtgatgtcacgtgtcttatgcacgaaggcaagaggaccgccgccgagtcgctgggcccactgctcggccacacggatacgtccggcatcgggggagacgacagcgacgttgtcaagatgcccctggaaacgatcgcggatgtaatcgaccagtaccggcatggcgatgaggtggtcgaccggaccatcaaagaagccttgggactgggcagcatgcagatcgaccgacatgatgcggtcggcgccggcggttttgagcaaatcgaagaccagacggcaggagatgggttcgcggccgcggtgctttttgtcttgcctggaataaccgagcagcgggcacacggcggtaatggagcgggcggaggcgcgcttcaaggcgtcgatcatgatgagctgttccatgatcgccttgttaatcggcttgtaatggctctgcagcacgaacacgtcggcgccacgcaccgattcggtgtagcgcacatacatctcgccgttggcgaaatcgtatgtggtggtttccaagatatcgataccgagctgatcggcgacatcctgcgctaacttcggatgaacccttcccgtgacgagaatgaggttcttatcgggctttccttcaaggattgcgctcaccattactcccaacatgtggtctcgctgatgcacccaccagcatagctgttcttaacgaccgtaaagacacccttgcgttgcttggcgttcacctaacggctttgcagggcgggtcggatttgctttgtctgcatcgcggctgtttagtggccggcctgcacccattgctctatggcttgtttcaccgtttgcgcgtacaggtcggttcctgcggaaggatgaataccgtcggaggccagcagctgcgtattcgtctgtgcggcggagtcccagtctgctagcacgacgttgtcttgatgggtgttcgcatagtcggacaacgcttggttggccacgggaatccagctgcggtcgccatggccgttgacgagcaccagcacacggtcagggccaatctgattgtgcagctgatcgagttgaccggtgcttattgcggaattggtggcaagcccgagaatgacccaactgcgcagcgttccggcattcaagtcattgttcaccatgccaggggccaccataatagagcgtgacacggcggcgtcaatctgaattcccggaaacacagcggataatccctgcgaggaagccagcatcacggagtcgccgattgcggtgatctggtcaccggtcggcatgccatgtcgcggcttggctggcggaggtgtgggggatcgcataagatcgctggctgtctgctgcgcctgacctgcctgttgcgactgcttctgctgctgcagggtctgagcttgctgctccaactgaatctgcacagaggttttctccggggcatgcacaaggccctgcacacatccaaccagagcaacggcccaaacgatatccactaccaccgcgcagactatctgctttgcaacagggttacggtacggcaccagaacctccagtgccgattgagcagcggccgtcttttcaaccatcagccaggagaacgccacagccagggcggttagtatggcggtgatagccagaatgatgctgtacgacggaccttgaatcatgcgaggtaacgtggaccggacgataatccacactggccagtgccacaggtagatgccgtatgagtagcgccccaatgccgctagcggcttgaacttcatcaggtcctgcatccacgagtcatcgctgatggtgcctgcaatcagtgccacagacagcacgctggcaataatgatgccgccgcggaatgcaaagttatcttgctgcccgttcaccgtcatgataatgagtgccaccagcgctgtcagcgacatcgctggtgcaatcgtttcccagagacgttgccgtgtggttttcgctgcggcttcggcaatgttgttgggaatattgttgggtattgcgggaatattgacatgcacggaacctgagtccgctgccgctccggcgactcggggagcttgcggcgttgcctgattgtggcgagtcagccaccaagccagggccacgccgagcatgagacccacgctatgggtatcggtgccgaaataaacgcgggtcggatctgcgcccggcttgtacatcagccacatggaagcgccgctgagggcagcaagacccagaggaataagcgaggcaaaacgggtatcgcgaatcctccacatcgcccatgcaatgaacggcacgatgatatagaactgcgtcagcacaccgatgaaccacaagtgccgtagaatttgtggattcgtctgctcgaagtagctttgcccgccggcaatggcataccagttgtaacagccgaacagcacggtgatgacctgattgcggatggcaaccagcaaatcccgttcggtcagccagcagacggagacgataacgggaatcagcaaaagcaaagccggatacagtcgaaccaagcgtcgaggaatataccgcctaagattcaacgagccagtggtggacagcgaacggaaaaggctgatggcaataaggaagccggataccgtgaagaatacgtcaacgccgtagaacccgcctggcatcttctgctgcacgcagtgatatagcacgatggcgataagtgccagacctttgataccgtcaagtccgacaaaacgcttcacagttttccatccctttgctgttgcgatttcacgattctcttctcttcgaacctcacaaaagaatcagggtcaagcatggtagaggggaacgacatcgaatgacatcgttcccctctaagcaatctgtattgctatcgctttattcccactcaatggccttggtcctaccgtgccgtcattccagttgcacccagttttcggcatcgacacggaacgcgtgccgccgaatgacgcgatgttgcgtttcgtcggcttcggggacaaaagttgggacaacttcaaaaactcttttcaaactcagggctttgagtttttgtttttgtcccaaagggcgcgacgggccgccctcggaggctcgatagcgccgaaaacgcccgtttcgaaactcaaccgccctttagtctgcaagccgccagctgcaatcgtaagtgaatcaacgcgggtggcttacgcgccgttcgcaaaaccgcaggtcgcatgtcttcgccatcggtaggcaaagtgagtagtctcaggtggcttgcccatgagttgacgaacgggccttgagattccgctgacgtccggaaacgcttcgagctcccttgaattttcaagcagtacatgatataaggtaattggttttccgttaggaaggcttccaagtgccggggacattttccccggcttttttcttatccaggagaacaatgcgagaactcgggttataggaactaaacgtggtgttttagactctggtttccttggtcctgaggtggcctatgagggctcttatgtcaaatgccgggctccggtcagcacggccgcgacttcgcgtggcgaggttgttgcccgtccatcgcgtgggcctcgatcgatccggtggccgcgtcgccgagattatggatggccttggcggaggcaacgagggcgtcgaaggcgtcgggaatcagagacgggtctccacggagtgcatccgcgacggcgagggtgatcaggacggccgcgcgggccaggcccgcggtgagtgcgaaatatcgtttcatgcgcgggggtatgcgtcacgtccgagggaggcgtctcgcggatggcgctattccgccgaacacgccgtgtgagcgggcggcatgccgcgctaatcacccgatccccaggggacgtgggcgtggaattcgtcccaggcgatgccggtgccgtattccgggaccccgacgccgacgtcgtcggcgcttccggccgtggatgccctcgccggcttccgttgttcgggacggatgagcgacgatggcttcggattgcggcttttcatgtagcacatccattcgcaggcgcgtctcatgtgctcctcgggcaggccccgatggttgaggagcatgcgtttgagcggcgagttgacgccgccctccaatcggttcgtggtgcgcgccaccgggccgacggcggtcagtgacgggtcgaggaacgcgaacagcctgccctcgcggaacagcttttccagtcgccgatagcagcggcgcagctcctggtgggtccaccaccattcctgtttggatgccttcgggttcgcggggtcgtccctcgcataggtgcgttcggcgatgaagtccctccaccggatgtgccacgcgttgagcgcctcgccccaccgggccgccgcctccgtatcacgcacggcggtcagcttgtcggagagtttcttgagttccctgccggcctcgagcctcggccgcgaggtcaggtcggtcctcgtgttgcgctgcacgtgcaccagacagcgctggatcctcgtgtccggccacgtctcccggcatgcgctctcggcgccgcgcagcccgtcggtgatcagcacgtccggcgcggggatgcgcgaaaacagcgccatataggcggccttcgactcgttcgagcaccactggatgcccagcacctcgccgctttcgccgtcgatggcgacgatcaggcaccaatcgtggttcatgtacgtgccgtccgccatcaccgtgtgatgtctcgccgagcacggcgggatctcgggccggatgccccagcaccattgcacgcgtttgcggaacatgcgcgagcccgtccccatgtcggcctgcctcctgccggaaagcagccatccgaggaagacgcgcaggtcggcgtcgagtctctcgtcgggtctcggaacggtggccccaagcgaacaggccacgcatttccaacgctgggagccggccctcgtcctgccgttcttcctcatcgccccgccgcagaccggacacaaccgcgcccttttcgatttcgtcctcatgcgcccatggaacaggcaaagaacggcagaatcacggatctttaatacgacgtcacattaaagccaccccaacacgcctactcccgcaaggccaaacccggaacataaacaccacgtttagttcctataacccgagaactcagcatcttcgtcgacgagtcgggaagcgacggcctctccgaccgccactacctccttaccgtcgtcatgcacgaccagtccgagagcatcgcggattcgatcgcggtatatgaggacgcccttcgcgccaaggggctcccggacatacccttccatgcgtcgccgctcatgaacggcaaggaccagtactccggactcgacctgagaacgcgcaagatgctgctcggctcgttccgagtcttcttccgccacatgcccgtgaagtaccataccttcgcatacgcgaccaaacagttcgcctcgctcgacaagctcgcggggacgatgcggagggacctcgtgaacttcctgttcgacaacctcgcggagctgcaatcctacgatatggtcaaggtctactatgacaacggccagcactccatcgccgagtccctccatcgcgcggtcgagtacgcgctgtcgaaggacgccgtcgtctaccgatcggcgcagccctccgagtaccggctttcgcaggcggcagactacgtctgcaccatggagctcacagcgattaagtacgcggagcatgcggccaccgccacggacgagaagttctttggcaaatggtccgatttcaagaagggcatactgaaggagacgcgcaagaagctcgtctagagaggcgatcggcccttggcggagcgtttaccgacaatggagtctgtcgcgcgcggagggttgataaatgtcacttagctgcataataggttccagttagaaaccctcgggtttgcggggtggaattgcgaaagcgattctgccctgtttccgagattacgaagcagcatcagaaggctataaagccgcatcggaggcagctatttcgcgattgggctcgaagagctgcaggcaatgagacgactccaatcggccagattcaagagccagtattgactaactcgaatccggcacgcatcctcgcgccgttcgtctgcttccgctcgtccgaaatcgccaaccgcaacaggccatgtcccagcggatgggtaccacttacccgggtgcacctggggcaacggaccggcaggcccgcggaaggtcgctcgcataacacgcaacatcaaacacgacagaagaggcgaacgacagatgccggatcccggacgacagcaccgcggaatacgagcattccgaccacaaccgaacaattccagctactaggcaggcgcccgcatgggcgccttttacttttcagggacttagccgcgagctagggcacgcggctcatggccgtttcgtgaaggcccgaccagctcgacccacctcgacccgtctccgctcccgtcgtgcccactaatcgccatcaggcggttcaatcgtcgcgcagacgaaaaggcacacggtgtcgtgcggtgtcctcgcgcggtgccgcacgggaagattggaggaaccctggcacgcacagccgaatgcgccgcgcccgagggcaaccaagattgcggcgaatggatgacggtgatcgagatgcaggagtacatgagggcgagccgaaacaaggcgtacgacctcatctggtcgggagagatcgactcgtacaggctcggcaggaagctcttggtttcgaggtcgtccgtggacgcctacatcgagtcgaggagcggcaggaaatgacggcggcgaccgccccgggagccgcccgcggccgggcacgcgagggagcctcgagacgaaaaggagctcgaggacgaccatgaccaagagcattagcaggagacaggtgagactcatcgtatcctccaacgcgatattcggcgtcgacgaggcgtgcgcgatgctgcgcatcagctgcgacgccatgtaccggctcgccaatatgcctcaaacatactggaactaccacaaggccatcaggccacaacacaaaggaaacgcgcttctcattgctccacactgttctttaataggggagaacgaaaagcaatcaacagcaaagcgccggggccaccgatggctatatggaaggaaaatgcctattttcgattccaaaggtcggcatcactggtaggcatatcatcatcctcgaattcaccaaggtaggtgtaatggtgatagcgttccccatcatgctcgtacccagtgtagtcataacctctctgagtaaccccttgataaggcttgaactccgcctcagcctcttctttggtgtagtggtcagcatcgaaccaaacgccctcggtcttatcatcgccccagccgagctttttggccttgaatacgtgtctcatggtatccacactttcactaatgactcccgtttaggctattatacgcactcccccattcagctcgttcgtcttttcggcatatccaaccaactggcctgtcatcagatgccccgacgtccccacggcgtccatccccgtcgtcgcgaagctgatgcccgagcttcatttggtcccatttccgctcataagtaccttgagactacggaacgtgcccgaaacgataacaccgctcaacgacaactcccgcgaagtgccggctgtggcctccttcagcgccgagcgcgagttgaacgcgtgttacattcgcgccgtgcgccacaacgcgctcatgccatccaccggcgcaagcgccgagaacccgtaaaaccaatagctcgtgcacggccacgaacccgcgcccacgtcgcctccgcttacgacgagcctagcctgcttggcgtgcatccacccaagacacgcattggacggcgttgcaccaacagcaagcaataacccagaggcgctcctcatttgcattatgcctaatgaagggcgcctctatttgggttaaatgcaatatgcgataacgaaacccccgaagtcagcgcccatttccgacgtctatgaacaccagccaatcgatactcaaaacgttgtgagtacaatttgagtaccaacctgagcgatcccttgcgagcaaaagcaatctgccggtcagcattaatttgaaataaattgatggcgttgcttcggtaattgaaagcactttaagacgtaccagtaaacaattatcccagctaaacagcttgagagattgcgtagctggtttgtatgtaccatatacaccacagcccgcggacacccatggcatgcaaataaaaaacgagggaggccgtttccgacctccctcgcaaagggctatttactactcccactcgagtgccagaccttaatttcttatgataatacgcattaagaatgcgattctcgtccaagtattccacatatttcacgttttacagagagtctttacgaattctgtagccattttgtagccacgatagcgtccgaaaatgcgcaagagttcggacgttatcgaatgatgctggagatcatggaagaataacagtatagtcgatcagccgggcagtgattagctgctcggctgattttatacagacatttcttccaatacgtcttggaacagcagctcttcaataacctgctgcaccttatatttgatggttcttgcgttttcacccgatgtagagataagaggactgacagcagcatataccatttctggtgttagcttagaatcatactcctcttttcgtgccagaatttcgttctgaacgatctggtatatggtttcacagctaaaatcatcaaagtggatgaacttatcaatgcggtaaaagataggtagccccaactgctttttcatttcttcttccgtctgataattggatgttaatataattacaataccagatacatctgcatcataagttgcatctttgaattgtgtattatcaaacagcgtataaaacgcagaaaagaaatgttccgggcatttatcaagttcatcaaagaacaccaaattggattcacgttccaacaggtcaaacccaaggcttcttctattaggagcatctccaaagaagtattctgagtagttattgttcttaaacatcgacaaatgcttctctaagcattttccgtcgaagaacattgctgcaatttctcgcaccagctcggtttttcccaagctgctgttaccgtacagcataattacatatggcttctctcttttaacgtttgtgagataccaaagacttttactgatttcttcaatagctatctgctgaccaaatattcgtgcagatatggcattgatattgtcaacaaataaatctgggtctcttttgatttcgtactcctcacagagaatttcaagctctataagatcacgtttatactgatcttctaaatacgctttcagaacacgaggcgggttatggatgtagatttctgcttcatctgtagttaaatcctcgattaacggccctaaacgatcatgcgctgcttctacaatgccatgataattatcattctttacaattagtatgctggcatgctgatcagatatcggacgactctgctttgcggtatccgatagctttaccaactccaaaaacgcatcaacttcatcatcttcggaaaatgatggcagtttggaatcaaaaaatgttttagaaccaacaatgatatgatactttctcttatcttccatctgacgcctccgctgttacacaggcatacagaacatcataaagagtaaccgtatctttaggtacaggtgttccctccgctttttctggaattcccacgctttgcatttcaggaggatagatatctgccaatgttttgggctgctcagcagaagaaattaaacgctccattttaccaatttcttcgataaaatcgaatcttcttctttcaaagtcacctacaggaatgcaatagagtgtcatggtcgttgtaagtatatcgtttcttttgtaattacttacaaaggcagcattattaaagcgaacatatcgcttttcgtcgactgcataagtatcataaccgtcgtaactatccatgacagttttgaattcatttgtgtccacaccatcaatgccgcctttgacaattttcaggtatcctcctgcaacacgaagagaagtagaagagttttctatatctgataattgaacattggaaatactggtcaacaacggtttcaacttctcaaattcagagatttcggtcgaagaaattgtggttgtgctgtcacggctaattacatacgatgcttctattttcccggtgaacagaaagaaaattctcgaaactaaaggaacatctagttttaatttcgcagaagcttctgtagcaacagacccctgtgtttggacagaatttgatacatctgtttttcgagataattcaccatggtcacgctcctgaagaatattgcggatggtttccttatcaaaatatataatcttgtttattgttgccatgcgattacctgtttggggagagcttcatcttatttcctgtagataaactcccagaaatcattttgaattactttttatttttccggttcgaggattccaagcttaccgtcactaaggtttatacggcgattaagtctgaactccgtaataccacgaatgctcaaattatcgaaatcaacatagaactccctggacaagaagtttacttgtgcgccgttccataccaacagtagcagcgcaccaagagagatcgtctggatttttaagccaagcactcggttaatatctttgattacttggaaatagccttgtcgcttatttgggaacgacagacatacaaccaacgctgcattgtcattcttgtcaaggttgtttctggagtgcataaccgcaatatcatcaagaatacttctcgatgcttccagcgtatctcttccaaattcaatttcgacaacgcctttgcaggtaggtttcaaattgctcgaatacacggcatccattcttgtgtaaacatcaccggttctgctttttgcacactcgtggttccatgcaataatcagatttcgaactagaatattaggaaccattgagcgaccatcaaactgagaaatatcctgatagatacgctccataattccatcggtctctttctggaactggtgattccaatggattttgtctaattctctaataaacagcttatgtgcttccagattgacatgattgatgggaatatcggtataatccgaagaaggttctgcaatttccgggagttctttgtcaaaattccatttgatagcgccagcagggcaaacattcaaatcacgttcatatgaaaaatccgggaaatgtctgcagttgatctctgcatcaataaacttcatgcagcgaggatcagtgcatctcagacaaccagccgttacccattcttcattacaccacaatcgagcgggttcgttgtatttttggtcaacagctctcatatcagaggaacgcaatgcagaaataatggttcgcttctgcgatttagttaaaagtggcatttgcaaatccctccaatcgatttaattctgcgatgttgattgtttgcgatatttatgacaatgtactacacaggcatccgtgaaggtgagcttctcgctttgaaacccgcagatattgacttcgagaaggacacgctgaccatcaacaaaagctatcagcgccttggtggcaaggatattatcactacacccaagaccccgaaaagcaatcgtgtgatcatgctgccggaagtgctgaaaaccgtcctccgcaactatatggagaaatgctacggcttacagcccgatgaccgactgtttccgtacaacagaagttttctctatcgtgagatgcagattgggattgaagcatctggggtaaaacgcatcagggtgcacgatattcgtcatagccacgccagccttggttgaacttggtttttcaccgctactgattgcggaacgcttagggcatgagcgagtgcaaaccaccatggatacctacagccatctgtactcgaacaagcaggtggaagtagccaaccagttagacaagttagccatttaaggcttcggctacaaaaaaatcggtttgatgtagccatcttgtagccacgaaaaacaagaatcccgaaaagcgctgtgttttcaacacttttcgggactcagaaacctatcttggattactcccactcgatggttgctgggggtttgctagtgcaatcgagtaccacgcggttgatctggcggcactcgttggtgatgcgcgtggaaatcgtggccagcacgtcataaggcacgcgagaccagtcagcggtcatggcgtcttcggaagacaccggacgcagcacgatgggggagccatatgtacgctcgtctccctgcacgccgacggaatggacatcggccagcagcacgaccgggcactgccagatgtcacggtcaaggccggccttggaaagctcctcacgggcgatggcatcggcttcacgcagcagatcaagacgttccttggtgatttcgccaatgatacggatacccaagccggggcctgggaagggctgacgccatacgatttcgtcgggcagaccaagttcggtgccgatggcacgcacctcatccttgaacagggtgcgtagcggctcgatgagctggaacttgatgtccttgggcaggccgccgacattgtggtgagacttgatgttggccgcgccgtcgccaccgccggattcaacgacatccgggtagagcgtgccctgcacgaggaacttgacttccttgccgcgggcgccggcctcttcgagtacctgacgctgggccttttcaaacgtgcgaatgaacttctcgccgatgatcttgcgcttacgttccggctcggagacgcccttcagcgccttgaggaagtcatcggccgcgtccacggtgatgagcttgatgccggtggcggccacgaagtcatgcttgacctgctcgacctcgcccttgcgcagcagaccgtgatccacgaacacgcaggtgagttggtctccaatggccttgtgtaccagagcggcagccacggcagaatccacaccaccagacagaccgcagattacttcggcatcgccgaccttctcgcggattttcttgacctggtcctcaataatggaggaggcatcccaatcgttgggcaacgcggcgcagcggtgtaggaagttctcgatgagcttctggccgagcggcgaatgcttgacttccggatgccactgcacgccatacaacttgcgggactcatcggccatggcggcaacaggtgcgccttcggtatgtgcgagcaccgtgaagcctgccggagcctgctcaacggccacgccatggctcatccacgtggtctgttcggcgggggagtcggcaagaatgccctcggcatcatcaatcgcggcctcggtcttgccatattcgcccagggcggccttatccaccttgccgccgagctcgtaggccatgacctggaagccgtagcagatgccgagcaccggaataccggactcgaataccttagtatctatggtcggagcaccgggctcgaatacggaggccgggccaccggacagaataatcgccttcggatccttggccaggatctcgtcaacgggcatggaatgagggaccagttcagagtagacgccggcctcgcgtacgcggcgggcgatgagctgggcgtactgggcgccgaagtcgacgacaagcacaggaccgtttgccattgattttcccctaacgtttaatgggattcaccgtgggttgaacatcaacgattatcaccggtcaatacgacaagcccgacacgcgatggctctgtgcggaaaacgaacaaatttctggtcttcacaggaacaacacgccggtttcgaacatggcaaatcgaacgtacgacaatggcatgaacaatgggttttccgcttattctcgcccatttgcgcatttctgacatgtaaaccgaatgctcacaaaccaatggttgaatcgcacaaatattgaaatttccagcacaatttcgaacacacccgcaagaaatcgttcaaaagtcgtgttgtcctcgtaccatgacgattgattgggaacgggaatccttggcgccgcaaggaaccaaggcccgcgacctaacggaaataatcaatcgcacgatcacgtgcaggagtacaggagtacacatgacgagtcctgttattggcaccccttggaagaagctcaacgctccggtttccgaggagtccctcgaaggcgttgacaagtactggcgcgttgccaactacctttccatcggccagatttatctgcgttccaacccgctgatgaaggctcccttcacccgcgaagatgtgaagcaccgtctggtcggccactggggcactacccctggcctgaacttcctcatcggccacatcaaccgcttcatcgctgaccacggccagaacaccgtgatcatcatgggcccgggccacggtggcccggctggtacctcccagtcctacttggacggcacctataccgagaccttcccgaagatcaccaaggatgaggctggtctgcagaagttcttccgtcagttctcctacccgggcggtatcccgtcccacttcgctccggagaccccgggctccatccacgagggtggtgagctgggctacgctctgtctcacgcttacggcgccatcatggacaacccgagcctgttcgtcccggccatcgtcggcgacggcgaagctgagaccggcccgctggctaccggctggcagtccaacaagctcgtgaacccgcgcaccgacggtatcgtgctgccgatcctgcacctcaacggctacaagatcgccaacccgaccatcctgtcccgcatctccgacgaagagctccacgagttcttccacggcatgggttacgagccctacgagttcgtcgctggcttcgacgatgaagatcacatgtccatccaccgccgcttcgccgagctgtgggagaccatctgggacgagatctgcgacatcaaggccgccgctcagaccgacaacgtgcaccgtccgttctacccgatgctgatcttccgcaccccgaagggttggacctgcccgaagtacatcgacggcaagaagaccgagggctcctggcgcgctcaccaggtgccgctggcttccgcccgcgacaccgaggcccacttcgaggtcctcaagaactggctcgagtcctacaagccggaagagctgttcgacgccaacggcgctgtcaaggacgacgtccttgccttcatgccgaagggtgagctgcgtatcggtgccaacccgaacgccaacggtggtgtgattcgcgacgacctgaagctgccgaacctcgaggactacgaggtcaaggaagtggctgagtacggccacggctggggccagctcgaggccacccgtaccctgggtgcctacactcgcgacatcatccgcaacaacccgcgcgacttccgtatcttcggaccggatgagaccgcttccaaccgtctgcaggcttcctacgaggtcaccaacaagcagtgggatgccggctacatctccgatgaggtcgacgagcacatgcacgtctccggccaggtcgtcgagcagctgtccgagcaccagatggaaggcttcctcgaggcctacctgctgaccggtcgtcacggtatctggagctcctacgagtccttcgtccacgtgatcgactccatgctcaaccagcacgccaagtggcttgaggctaccgtccgcgagattccgtggcgcaagccgatcgcctccatgaacctgctggtctcctcccacgtttggcgtcaggaccacaacggcttctcccaccaggacccgggtgtcacctccgtcctgctgaacaagtgcttccacaacgaccacgtcatcggcatctacttcgccaccgatgcgaacatgctgctggccatcgccgagaagtgctacaagtccaccaacaagatcaacgccatcatcgccggcaagcagcccgctgccacctggctgaccctggatgaggctcgtgccgagctcgccaagggtgccgccgcttgggattgggcttccaccgccaagaacaacgatgaggccgaggtcgtgctcgccgccgctggcgacgtcccgacccaggagatcatggccgcttctgacaagctgaaggaactgggcgtcaagttcaaggttgtgaacgttgccgacctgctctccctgcagtctgccaaggagaacgacgaggctctgagcgacgaggagttcgctgacatcttcaccgccgacaagccggtgctgttcgcataccactcctacgctcacgacgtgcgcggtctgatctacgatcgtccgaaccacgacaacttcaacgtccacggctacgaggaggagggctccaccaccaccccgtacgacatggttcgcgtcaaccgcatcgaccgctacgagctgaccgccgaggctctgcgcatgatcgacgccgacaagtacgccgacaagatcgacgagctcgagaagttccgtgacgaggccttccagttcgccgtcgacaagggctacgaccacccggactacaccgactgggtgtactccggcgtgaacaccgacaagaagggcgccgtcaccgccactgccgccaccgctggcgacaacgagtgatgacaccacttcggtgttgttagttcgctaacacgaagggctcgggattcgtcccgggcccttttcgtttccccgattaccggggcttcccacccgacatccgggcaaccgtctattgtgttgaagtgttctgaacactgaagattacttcaagacattccaatcgaagggaatacgtcagttatggcattatccgcagccatcgttctcgctgccggtgaaggcacccgtatgcgttccaacaagcccaaagtcctgcacacctttgcgggcaagaccttcctcaacagggtcatgaattcggtctccgcgctgaaccccggcactcttgcagtagtggtgcacttccaagccgagcgtgtcagcgaagcagcccgatcctacgacgagcacgtcaccatcgtgaaccaggacgatatccccggaaccggccgtgccgtgcagtgcgcgatggcccagctcgccgcccagtccgaacttgacggcccggtgctaatcgccgcctcggacatgccgctgctggatagtgagacgctgcgcaaactggtcgaattccacaccgcatccggaaacggcgccaccgtgctcaccaccatgcttgatgatccgaccggctacggccgcatcatccgtgaccgtgagggcaacgtgctgcgcatcgtcgagcagaaagacgccaaccgcagcgaactggccgtgcaggaagtgaacacctccgtctatgtgttcgaggcctccgtgctggtcgaggccatcgccggcctcaaatccaataacgcccaaggcgagttctatctgaccgacgcgttggagaccgccaagtccgcaggcaaggtcggcgcattcgccgcgccagatccgctcaccgtggaaggtgtgaacgaccgcgtgcagcttgccgcgctgtccaaagcctataaccgccgcatctgcgaacgctggatgcgcgatggcgtgaccattctcgacccggagaccacgtggattgaagacgacgtggaaatcggtcgtgacgccaccatcctccccggctccttcctgcagggccacacggtcatcggacaggaagctacagtcggcccgtacgccacattgatcgatgcgacggtcgatgacggtgccgtggtcgagcgttcccgtgtgcaggaatcccacatcggcgcgcgcacgaacatcggaccgtggacctacctgcgtccgggcaacgaattcggcgaggacgccaaggccggtgcattcgtcgagatgaagaaggctcacatcggtaacggcaccaaggtgccgcacctgagctatgtgggagacgcccagcttggcgaccacacgaacgtcggcggcggcaccatcaccgccaactatgacggcgtgcacaagaaccgtaccaagatcggctccgattgccacatcggtgcaggcaacctgctggtggccccggtcgaagtcggcaataatgtgacctccggcgccggttccgtgatccgtcacgctgttcccgacgatacgatggtctactccgaaaacacgcagcataacgtcgagggctggaagcccgcttgggagcgctgaatcatgcccgcagtacaggattccatcaacgccatccgcgtggccgccgaggcggcagaccgtatcaaagccactgatatcgtggctttcgacgttgccgacctgcttggcatcaccgacatcatgatgattgccggtgcctcgaacgagcgtcaggtgctggccgtggccgaggaaatcgagaaggatctcttcctcaagtgcgatggccgtcagccgcgttcgcgcgaaggtctgaccgaggggcagtgggtattgctggactatggcgacttcgtgattcacgtcatgcatgatgaagcccgtgaattctacggtcttgagcgtttgtggaaggattgcgagagcatcgatcttcagctcgggcatcctgaaagcgtggcggcatgacggctcagcatgttcgttccatattcttggttcggcacggacgtacgtcgtataacgcggtccataagttgcaagggcaggtcgacattccgctggatgccgtaggtcaatggcaggtgcgtcagactgctgcagcgctgaaggacctatacgtcgatcgcaggccggaaaccgacgaacgcatcatcgtgtgctccgatctgagccgtgcgcatgccaccgcacaggcttttgcagatgtactggatggcaccgaagtgcacgatgatcctcgcgtacgcgaacgcagttttggcgattgggacggtcacgccgtatccgaactggctgagcgatatcctgaggacttccgttcctggatggagcatcgaggcggcgagatgaagtatggcgccgaggccaaagaacatgtgggggagcgtggcgtcgaagccctgcgtgactggtccacgcgtgccggcacggacaccgatctctttgtgttctcccatggtgcgtggattgcacagacgcttcagacgctgctgggcatcaccgcagtcgatcccactttttcgacggtgatatccatgcgcaacgcgcactgggtgcgtttggttcccatggatgagcctgatgacacgattcgttggcggctcatggactacaaccacggtccagccgtcgccgataccgacgagtgggaacgggaacgttgacctgaacagccggtgattgtggtgtcgccaaatcacgccaatgtcatttggcgacacgccgatttgcaggatacaggaacccgtcgtaatgtagacaaggttcaaaaacggactgacaattgaaaacggggctatagcgcagctggtagcgcatctccatggcatggagagggtcgggggttcgaatccccctagctccacgacgaagccatcggcatgcatctggtggtttctccgctggttcatggcgggtcgaacgactcccatgaatcggatagcttcattcggggctatagcgcagctggtagcgcatctccatggcatggagagggtcgggggttcgaatccccctagctccacaaacaaggccggtgcaatatgcaccggccttctgtatttggcgtgcaccttagtcgtgcagcactccgaagtgcagcaaggcgtgcaatacgccgtcatgatccacatcatccgtgacatagtcggcagcggccttgggctcgtccgtggcgttgcccatggcgaccccgattccggcataggccagcatgtccgtgtcgttgccgccgtcgccaaaggccatggtctgttcgcgggtgatgccgtaatgcttcataaaacgctgaatgccccgtggtttgccaccatcggcgggaatcagatcggtgaagtccgggtgccagcgcacgccgcgtatgttgctgcacagtcccaccagttcggcctccagctcggggtcgatgaacgggctgatctggaaggtctcgtgcgtcaacgcccgcacatgaggatcctcgaaatatttgacgggggcggttttgccaagaccgctccagatctgctgcaatgcctcgttggtatggttgaagtagacgtaatccttttcaccaaaatcacacaccacatcgggatgctggtcgagccaatccaaaatcacgcggatatcagactgatccaaggcctgtgattcaagatatccctgttcgtcaaaacaatattgaccattgaacgccacaatgccgtcgaatgagatcggcatggtgtccagcaccaccttcatctgagaaggagcgcggccggtgcagataagcaccttgatgcctgctgattgaagccgctgaatagcctcaacggtggcatcgggaaccttgtgcgtgacgaaactcgtgagcgtgccgtcgatgtcgaaaaacacagctttaatgtcggtggtagtcatgcttctattttcgaggctcctctcgacgcgccagacatgcttatagcgtgctatcaacatcaggcaacgcaatgtgttgcatgcgcgccataaaagacacctatacggcaatccgccatttttgaccatttctgggattttgggtgctacggtgaaacctgtcatcaacgtgatgggttcgcttggggaagcgaatcaccgtaagaagatgcaacagcaatttccatgagagagaggaatcattcatcatgacagcagcaacccagccggcaactccggccgctcccaacagcaacgaaccggtgcgcgtgaaccacaccgcccgtaacatcatcattaccatcgtggtcgtggcgatcatcgccgtggccgcgttcttcggctaccgcgcggtggccggcgctaacgaatccagcgccaagggcagcaaagacaacccggtcaagatcggtgtggtcggtgccaccaacccggaatgggtcaagttcaagcagaatgccgaaaaggccggcatctatgtcgatatcgtggacttccaggactacacttccgagaacccggcccttgattccggcgagctggacctcaacgagttccagcacctgctctacctcgccaactacaacgtgagcaacaacaaggatctgcagcccatcggcggcaccgccatctacccgctcggcgtgtactccaccaaggtcaaggacatcaaggacatcaagcagggcgacaccgtcaccattccgaacgatgagaccaaccaggcccgcgccatcggcgtgctcaaggcagcaggtctcgtcacgctcaagggcgactggaccgccttctccaccccggccgacatcgatgaagccaagagcaaggtcaaggtcaccccgctgaaggccgaacaggtggccaccaccctcaaggatccgaccatcgccgccggtgtgatcaacaacgattacgtggccgacgcgggcctcaacccgaaagacgccatctatcaggatgacgtcgaatccgaggaagcccgcccatacatcaacgtgtgggtggcccgcaagacggacgtgaacaacgagacctacaagaagctcgtctccatcttccagcagaaggacgtgctcgacgccctccaggagaactccggcggcaccgcggtgtttgccgacaagttcagcgtcaagcagctgcagggcttcctgtccgacatcgagaaggacgccaaggcccagaagtaagagaaccatcggctggtttccgcaccgagctgtagtagcgagtattcgatgcgcatagcctgctgaaccgtaacggagcgagccgcctgcatagggcccgctccgttacggcataactagaccggacgcaatcgccggtattccagcccatacaacattggagcaacagtgagcgatcccatcatcacttttgatcacgtggtcaaagagttcaagatacgaggacgaaaggccgagaccgcgcgagccgtgaatgatgtcagcctgagcattgaccgtggcgacattttcggcatcatcggctattccggtgccggcaaatccactctggtgaggctgatcaacgcactggagcgtcccacttccggcacggtgaccgtgctcggtaccgacatcacggcactgaacgagagcaagttgcgccctatcaggcagaaaatcggcatgattttccagcagttcaacctgttctccaccaaaacggtgtcgcaaaacatcgcttatccgcttcagcttgatcattggcgcaaggactatcaggatcggcgcgtcaaagaactcctggaattcgtgggattggccgagcatacggataagtacccctcacagctgtccggtggtcagaaacaacgtgtcggcattgctcgcgcgctagccaccaatccggaaatcctgctcgcggatgaggctaccagcgcgctcgaccctgaaaccaccaccgaggtactggcgttgctcaagcgagtgaatgaggaattcggcatcaccatcgtgctgatcactcaccagatgaacgtggtccagcagattgccaaccgtgtggcggttatgagttccggacgcgtggtcgaatccggtgacgtgtacgacgtattcgccgcgcctcgccagccagtcaccaaacggttcattgccaccgctttgtcggggcttcctgaggaaagccgtgtcgaacgtctgcatggcgagtggtcgggacgcattgtcaccgtactcatccggcaaaaggatgtctctgatgaccatgggcgcacattgcatgcctcagggcagaacatttcagagctgatcgccaaatatggtgtggaatccagtctgctgtatggcggcatcgatacggtcaagggatcggctatcggcgcaatcacctatgaattcaacggccctggatggcatgtggacgagtttttgcatgaactcgcgcaacacagcgatgtcattgatttcggcaccgccgagaaaccagtggcatacgctgatgcggtcgccaatcatattgccggtgccgaagcggccatagccaaccagcaatccgtgagccaggatgagtcggcggaaatctccgccagccatgaaggagccaacgcatgattacccttgccaacccccgtagcgattggactgtgctgcgcccgctcctgtttgaatctatcggtcagacgctgacgatggtgcttatcactcttgtcgtaggaggacttcttggattgattcttggtgtggtgctctatggcacgcgtccaggcaatttgtttgagaacgccatcgtctaccggattctcgacgtgatcgtcaatatcgtccgcccgatcccgttcatcatcttcctggccgccatgcagccgttgaccattgtggtggtcggcacctccatcggtaccgtggccgccatcttcccgatggtggtgatgtgcacttttgccacatctcgtctggttgagcagaatcttgttccggtcgatcccggcgtcattgaggcggcgcgttcgatgggcgccagcaaattcaccatcatccgtaccgtgctgattcccgaggccttggccccgttgattctggcctatgcgttcctgttcatcggcgtgctcgacatgtctgccatggccggatacatcggtggcggcggacttggtaacttcgccatcgcttacggttatcagaagttcgaccagaccgtcacatggacggcagtgatcatcatgatcgtgctggtgcaggtggtgcagggcatcgccaacgccattgccaagcgtctactcaagcggcagcaatgatcaatgatgtctgccgagccctcgccaatatgaagcgggggcttcgtcatattgtccgttctactacaatcgagaaccatgagtgaacatatcgatatcgaccacgaactcattgccatccgtcactatctgcacgcccaccccgagcgcagttttcaggaattcgacactagtatctacctgaccgaccagctcaaggcgcacggcatcgaaatcctgcccaactccatggaaactggtgtggtgggtcttatccaaggggaagccgggcccgggccacgcatcggattgcgcgcggacatcgacggcttgcccattgtggaggattccgggttggaattcagctccgtcaacaaaggcgtgatgcacggctgcggccatgacctgcacatgaccggtctgctcggagccgccttctggcttgccaatcaccgcgacaaattcgccggctccatcaagatcctgttccagcccagtgaggagacggggcagggtgcccgtgcgatgattgacgccggcttggtggatgacgtcgatgccatcatcggtacccacaacaacccgaactatgcccctggtcagcttgccatcggtgctgaaccgatgatggctggctgtgtgaaattccatgtgacgctccacgctcaggggacgcatgccgcctacccgtacaaaggcaccggcccgcttgaggcgcttgccagtatgattttgagcctacagaccatcgtgagccgcaatgtgacgcccttccatccgctggtgctgtccgtcacggaagtgcatggcggcgacgtgtggaacgtggtgcccgccgaagccggtttccaaggcacggtgcgttacttccataaggaagatggcaatctggtgggtcgtcgattcaaggaggtcgttgaacatacggctgaggcgtacggtattacggccgatgtggactggaacgattttcaggatccattggtctccaatccgtccctcgccaaggccgtggccgccgacgtcaacgattatgcgcagctcgagccgattcgtccgtcaatggcgggggaggacttctgcgagtttgcaaaagtcacgttgccggtgtttgcgttcgtgggctcaaacggccaagagggttgcgccgactggcacagcccgcacttcgtgggtctggatgaatccatccccacgttcgtcaacttctatgtcaacgccgccctgcgcgtactcaacgaattgaggtaaattcttctctggctcccctctctgaggggagctgtcgccgcaggcgactgaggggagccaggtggaggtcaacggtgagtacactaagaagctatgacacagcttcgcttcgcactcgcccagattgacacttgcgtcggtgcgctcgacgccaacgccgccaaagtgctcgactattcccgcaaggccgctgctggggacgctcaagtagcggtattccctgaaatgacgctcaccggatatcccattgaggatttggctttgcgccgcaccttccgccagggcgcgtgggacaaggccaatgaactggccggtcagcttcaggacgaaggtcttggccatttgttcgtggtggtcggcactgtgggtaccgatcgggaaaccagcaagccgcgtaaccgtctggtggtgctgcatgagggcgtggtctggaccggctatgacaagcacttcctgcccaactacggcgtattcgatgagttccgcatcttctccgcaggaaaccgttccgtgaccctcgaggtgaatggcaccactatcggcgtggccatttgcgaggatatctggcaggacggcggcccggtggctgaactcgccaccaaaaacatcgacttgctgttgaccattaatggctctccgtatgaagaaggcaagaccaacactcgttttgaactggcgcaacgccgtgctgccgaggtcaacgctccgcttatttatctgaatcaggtgggcggtcaggatgatttggtgttcgacggcggtagcttcgtggtagatgcggacggtacgttgctcgagcgcagcccgatgtttatggaagacctcacgttctgggatttcgacgccgctgccgaccatcagaccaaatccaccatcgtggccgaacttgacccggacgaagaggtgtacaccgcttgcgtgcttggcctcaaggattacatggccaagaaccatttcaacggtgtgacgctagggctttccggcggcatcgattccgcgttggtggccgctatggccgccgatgcctgcggcggcgagaacgtctggggcatctccatgccgtccatgtactcctctgatggctccaaagacgatgctgcagatctggccgccaacatcggtgcgcactatgaggttcagcccattgagccgctgttcgtcgcataccagcagcagcttgatctcgatggcgtggccgcagaaaacctgcaggctcgcattcgcggcgtcatcgtgatggcaagctccaattcacgtggtctgcttgccgtggccaccggcaacaaatccgaactggcgtgcggctattcgaccatctatggcgatgcggtcggtggctatgcgccaataaaggatttgctgaagacccgtgtctgggagatcagccgttggcgcaacaaggccgcagctgcgggcgttggcatcggcgggctcaagattgtaggcaatgaggaaggcaatgcgggcattcctttgaagaatggcgtgatgattccggtctcgtccatcgaaaaggcaccctcggccgaattgcgcccaggccagaaggattccgattcgttgcctgaatatgcattgcttgacaaagtgttggccgcctatatcgaacatgcccacggccgtgtagacctgttggccgacggattcgatgaggccacggtggacaccgtgatgcgtttggtcgatcgcgcagagtggaagcgccgacaatacccgctgggtcccaaggtcacagctcttgccttcgggcgcgatcgtcgcctgcccatcaccaacgcattccgtgaatagttacaaaagaaggtaccaatggcagatgatgaaaagaatcagtggtattacaacaccgtcaagcagcgggctgaatatggcaagatctcgccgatagaacagcgtatgggtccgtacaagaccaaagaagacgccgaacatgcgtgggatatcgtggtggaccgtaacgccaaatgggatgaggaaaaccgccgctgggataactacggcgtcaaaccgtccgccggcaaatcgtcggataccgactgaccatatgtgttttcaccgcgatcggcgaacatgccgatgacggatgacagatagctacaccgctcaacttcacatcgagagttgagcggttttgtctaatatcggccgtgacaatcggacggcggatgctggaaaccgctggattggtagcgctcacagaagaatgtgagatagctcactcccaatttcagcttttctcaagactgtgcaaactacactagtgaagcaagggttccgtgaagatgcgaaacctacaaccccattaaggagtgacatgaccgcagtagaaaatgcagctgtctcccaagaggagctcgacgccaaggcgtgggccggcttcaccgagggcaactggcagaaggatatcgacgtccgcgacttcatccagaagaactacaccccgtacgagggtgatgagagcttcctggctcctgccactgagaagacgaagcacctgtggaagtacctcgacgacaactacctggctgtagagcgcaagcagcgcgtctacgacgtggacacccacaccccagctggcatcgacgccttcccggctggctacatcgactccccggaagtcgacaatgtgatcgttggtctgcagaccgacgtgccctgcaagcgcgctatgatgccgaacggcggctggcgtatggtcgagcaggccatcaaggaagccggcaaggagccggatccggagatcaagaagatcttcaccaagtaccgcaagacccacaatgacggcgtgttcggtgtgtacaccaagaacatcaagatcgcccgccacaacaagattctgaccggtctgccggatgcttacggccgtggccgcatcatcggcgactaccgtcgtgtggctctgtacggtgtcaacaagctgattgccttcaagaagcgcgacaaggactccatcccgtaccgcaacgacttcaccgagccggagatcgagcactggatccgcttccgtgaagagcacgacgagcagatcaaggccctcaagcagctgatcaacctcggcaacgagtatggcctggatctgacccgcccggctcagaccgctcaggaagccgtgcagtggacctacatgggctacctggcctccatcaagtcccaggacggcgccgcaatgtccttcggccgtaactccgcgttcctcgatgtcttcatcgagcgcgacctcaaggccggcaagatcaccgagaccgatgctcaggagctcattgacaacatcgtcatgaagctgcgcatcgtccgcttcctgcgcaccaaggattacgacaacatcttctctggtgacccgtactgggcgacctggtctgatgccggcttcggcgacgacggccgtccgatggtcaccaagacctctttccgtctgctcaacaccctgacccttgagcacctcggacctggccctgagccgaacatcaccatcttctgggatccgaagctgccggaaggctacaagcgcttctgcgccaagatctccatcgacacctcggctattcagtacgagtccgacaaggaaatccgctcccactggggcgacgacgccgccatcgcttgctgcgtctccccgatgcgcgtgggcaagcagatgcagttcttcgctgctcgtgtgaactccgccaaggctctgctgtacgccatcaacggcggccgcgatgagatgaccggcatgcaggtcatcgacaagggcatcatcgacccgatcaccccggaagccgatggcactctggactacgcgaaggtcaaggacaactatgagaaggctctcgagtggctgtccgagacttacgtcgaggctctgaacatcatccactacatgcacgataagtacgcctacgagtccatcgagatggccctgcacgacaaggaagtataccgtacccttggttgcggtatgtccggtctgtccatcgccgccgactccctggctgccatcaagtatgccaaggtctacccgatctacaacaaggatgccaagaacctcgaaggccacgagtacgagtacgtcgagggcgctgacgacgatttggtcgtcggctaccgcactgagggcgacttcccggtctacggcaacgatgacgatcgcgccgatgacatcgccaagtgggttgtctccactgtgatgggccaggtcaagcgcctgcccgtctaccgtggcgccgtcccgacccagtccatcctgaccatcacctccaacgtggagtacggcaagaacaccggttccttcccgtcccgccacaagaagggcactccgtacgctccgggcgccaacccggagaacggcatggactcccacggcatgctgccgtccatgttctccgtcggcaagatcgactacaacgacgctcttgacggcatctcgctgaccaacaccatcacccctgatggcctgggccgcgatgaggacgagcgtatcggcaacctggtcggcatcctggatgccggcaacggccacggcctctaccacgcgaacatcaacgttctgcgcaaggagaccatggaggacgccgtcgagcaccccgaaaagtacccgcacctgaccgtgcgcgtctccggctacgcggtgaacttcgtcaagctcaccaaggagcagcagctcgacgtcatctcccgtaccttccaccagggcgccgtcgtcgactgatgaccaaccccgcgatacgtggcaatgactaatcgaaggggtggggctcagctccaccccttcgttatttccccacatagactttcgcatcatttgggacaggaggacgacgatgcctgcaacacccacgttccgcaccactaccaggcatatgctcaaggaatcgaagacctatgcctcacagactttgatgggcggcctttccggctttgaatccccaatcggactcgaccgacgtgaccgcctctccgccctcaaatccggcgatatcggcttcgtgcactcctgggatatcaacacttccgtggacggtccgggcacccgcatgaccgtgttcatgtccggctgcccgctgcgctgccagtactgccagaaccctgacacctggaagatgcgtgacggcaagcccgtctatctcgatgccatgatcaagaaggtcgaccgctacaaggacctgttcaaggccacgcatggcggcatcacattctccggcggcgaatccatgatgcagcccgccttcgtctcgcgtgtgttccacgcggccaaggagatgggcgtacatacctgcctcgatacatccggtttcctcaacaccaactacactgacgagatgctcgaggacatcgacctgtgtctactcgatgtcaagtccggcgacgaggagacttatcataaggtgaccggcggcacgttgcagcccaccatcgatttcggccagaggctcgccaaggccggcaagaagatttgggtgcgattcgtgctggtgccgggactgaccgactccgaggaaaacgtggagaacgtagccaagatctgcgagaccttcggtgattccgtcgaacatatcgacgtgttgggctttcatcagctcggccgcccgaagtggcatgagctgcgcatcccatatccgttggagaaccagaaggggcccaacgccgctactcgcgaacgtgtggccaagcaattcaaagatcatggcttcactgtgtactaaatctcgatgaagctctcctcagagaggggagccaagttatatctctctggctcccctctctgaggagagctgtcgaacggagccgacttaggggacataaaattccccttaaaagtggctaaaactcgcgccacgccgcgcgttataccgcgattgcgccaaaacgcccataccctagagatatggccgatatttacgcattccctacgggtgagcccaatgaagggcaccccgaacgcccgcagggcgtaccggatgatgtatgggcggccgttgaatccgtgagcgccatgaagcgcctgtatgacgtgcgctatcgggagattcccgttccttccacccttgccgactatggcattggcgtggaacttgaagcaggcgagcggatggatagccatccctttgccgccgacagtgtttccgagccgcatgttgccaccggatgggtaatgacgttgtattcgcacgagctgcgccctgattggaattccaattggcgatgcgtggcgttcgcgcgcctgccgttggaaccttccgaaaacgactctctcgccccgggcatgtattgggaagatatgtgcgattatcttggcgaagtcgaaccggactcgatttccggaacggtcaccgtcacccagaacaccacattcggcctgatggccggcagcaccagcgccggttgcgagatacgtgtctcatggacgccacttgacgggaccgggccagacggtactatggacgccggcgcacaagtgaactcgtgggccgcattcatcagatcaactacccgtcgtgaggaggatgacgccagttgagtgacgtccatgacaccgaaccacggttactgaaagagccgcgcgggggagtgccggatgttacctcgacgattgaaggctatcatcacgtctgcgaagcgttggctgatgcttctggctccttggccgccgatgccgaacgcgcatctggattccgttatggccacgaggattggctgattcaatgcaaacgagaaggtgcgggcatcgcattgctcgaccccatcgccttgacccaatctggtgccgactggaacgaattcaatgaggccgtgggcgatgccacttggattttgcatgattccctgatggatttgccgggattcgctgatctgggacttcagccgaaggcgctgttcgacacggagatcgccgcgcgtctgctcggtttgcatcgattcggattagccgccgtcaccgaacattatcttggcatcactttggccaaggaacattctgcggctgactggtcctaccgcccgctgccacgagactggcgcaactatgcggcgcttgacgtggaagtgctgatcgagctcgaaaacctgatgcgccgcgatctgagagccgccggcaaggacgagtgggctgaagaggaatttacccatgcactgtccgaaggactcgcccctcgcaaaccccatccggttccgtggctgcgcatttcccgcatcacccagctgagccgtgatccgcagggattggccatcgccaagtctctgtggcaggagcgggacaaactggcccggcagcatgacattgcccccagcctgctgttgtctgattcctcgattatcgaggctgcgacgcgcaagccgcataatgccgcccagtttcgggctctgcgctcgctcaatgagcgtgtgcgcattcgcaccggcaccgagcaagacaagatgtttgaacgttatgccccaatccagcgtgccgtcaaacccaaggtttggaaagaggccattgatcgggccatggcgctgcgcccctcccaatggccgagtatgccggcacccgcgccggacgagaacggcatagtgaatgcaccgcgttcgatgcgactctggcagcaaaggcaccccgaccgatatgaccgactgcaaagggtccgtcgcgtgatcacttcgatagccgaagatacgcgtacaccggccgagatgattatcaagccgcagattctgcgcaacctatgctgggtggagaatccggccgaagtggacgtcgaggagttcctgatcgcgcagggcgcaagaaactggcaggtgaaactcattgcaccgtccgtaagtggcgttattatgtagaggttgccttacggcagaactgtaagaaaatacgacttttgaggagtcattagcgtgaagatcagcgttcgtaacctcgagcccaccaaggtgaagctcaccgtcactgttgaaccggaagagctcaacccgtatctggatgcggcccgcaaggaaatcgccaagcaggtgaacgtccccggcttccgtaagggccacgttcccggcaagatcatcgatcagcgtatcggtttcgctgccgtcgccggcgaggccgtgaacgacgccgtgccggagctctactccaaggctctggacgagaagaagattcgcccgatggctcagccggagttcgacgtgcaggacgtgccgcaggccgccaacgacgacaccaagctgaagttcaccgcgaccgtcgagcgtcgccccgacatcgagctgccggaaatcgatggcctcgagatcgccatcgccaagccggaagtcaaggatgaggacgtcgacaagcgccttgaggcgctgcgccagcgcttcggcactctggtcggcgtggatcgtccggccaccaagggtgactttgccaacatcgacctgactgccgagatcgacggcgagaccgttgactcccaggaaggcgtgagctacgagctcggctccaacaccatgctcgacggtctggatgaggctcttgatggcctgtccgccggcgaggagaccaccttcgaaggcacgttggaagccggcgaccacgaaggtcagaaggccactgtgaaggtcaaggtcaactccgttaaggctgaggagctgccggagctggacgacgagtttgcttccgaagcttccgagttcgacaccctggacgagctcaaggccgacatccgcaaggccgccgctcaggacgccgaaggccgtcaggccaccgaggctcgcgatgccttcatcgccaagctgcaggaaggcctcgagattccggtgccgaagggcgtcaaggccaacatggtcgccgagcagctcaagggcatgaccccggatccggagaaggccaccaaggagcagaaggctcaggccgaggaaaccgtcgagaaggaactgcgcgaccagatggtgctcgacgctctggctgagaagctggacgtccaggtctcccagtccgacgtgttcaacttcctcgcttccatcgcccagcagtacggcatggatccgaacaacttcattcaggccatcatcaagaacggccagctcggctccgccgtgcaggaagtcggacgttccaagggcctgctcgccggcatgcgcgccgtcaagttcaccgccgatggcgaggctgtcgacctctccaacttcctcggtgaagccgctgaggaagaggagtccgagtccgtcgaggccgcttccgccgccgctgccgtggctgacgagctgtcctccaaggacaaggacgctgagtgagcctagcttgcttgcgttagcgtaactgttaagcccggaaccgtgtttcatggttccgggctctttctattcttaaagaagtattgttccattggctcccctccttgaggggagctgtcgagcgtagcgagactgaggggagttcccaagggcatactcgttgcataaagtgcggaggtcgacatgcaaccagtagttaccgccaaacgtcttggctggcttgcagcgacaaccatcatccttggcgtgatcatcggcgcgggcgcaggtctgctgacgctgctgctctacggcgtcgagcacgtgatgctcggctatgtcgagggttcggaattgcccggcccattcggtgtgcccgctgtacgccgtgcgatttcggtgaccatcggtctcgccgtagccggcgttatctggtatttcctgcgtaacaagaccaccaaggtgccatcggtcaaaaaagccgtggcgggggagcggatgcctgtatggcagaccttggtgcatgtggtgctgcagatcggtatcgtcggttcgggcgcgtccattggacgagaagtcgctcctcgtgaactcggcgccatgttggcgcaacgtttctgcgacctgttccatatcgaaggggccgacggcattgaccgccgtatggtggtagcagtggcggcaggtgccggcttgggcggcgtctacaatgcccctcttgccggcatgttcttcgccgtggagattctgctggtggacgtgacccttgagaaggtcgctttcggtttgggcatgtccgcgattgccgcgttcgtggcggcgtcgattaagggccatcacacgttctatgacatcaccgccatgcaaccgcaatccacgcctaccctgatgctgtttgcggtgctgtgcggcgcagcgtgcggtgtggctggcgcatggtttcgcaaaggctcgcaatgggcggaatcccatcaatcgcatgacaagcatattttgtggcagatgccattggctggtctggtgactggattggcggcgattgttgttccgcaggtgatgggcaacgggcgcgctgcggcgcagcttggtttcagtacattcgtgccggagggctctgccgctgccggcgcatcgcaatcggcttcttcggcggcggcctcgccttggaatctgttggcgggcggcggcaacgtttccggttcggcttctacggcggttaatgccggtttccagttgtctcaatcgaatatcgccatgctgctgggtgtgcttgagctgacgtttgttgccaaggcgttggtcacgctaatgaccattcgttcgggtgcctcaggcggcgtattgcagccgggcatcgcgttgggatccacgctgggtgcaatgctggggctcatttggatactgttgttcccggctgactcggtgactgcttgtgcgctgattggtgccgccgcattgctttcggcatcgcagcaagcgccgttgatggccatgtgtttggtgatggaactgaccgaagcgcccagtgtgttcttcatgccggtcgggttggccgtggccgcatcgtcactggtgtcgaagtggatgttgagccgtcgtaagtaggaagttgttttggctcccgctggcgggagcggaaagaataagctatgtctgaaaacactgagattcgtgcggcgctggaatcgcttgctgccgagccattgtctgagcagatcgactattaccgcaagccgtttatggtgttgtgggccgccatccaggaggctgccagcggtgtggccgaagactatgatttgcctacggacatggcccagttgtgggtgtccgaacagatgagacaagtcgcggactcactggttgacagactcgcggaaaaggccgtctcgcgcggtgccagcaagtcgaatgtggcccgtgccgccggggcgagtccagccaatgcaatgcgccggttcccccgcctcaaagacgattcggcccagactcgcctgctcatcgacgacgtcctcgatactctcgaataacctccctctgacgagggaggtggctcgatgaagtcgagacggagggagagatatcctacgctggccgccaaaaagcgcgtgaaaagccgtcttcagtcgcttcaaggcggtagtctgaacaatgttcgagtaatttagaaggagaatcaaggtgagcaatgcctttgcgaccttgccggtcatggcgggcgatgacgtcccggccggccccgtcgacccgattttcaaccgtctgctcaaagaccgcatcatctggatgggtgaagaggtcaaggacgatatggccaatcgcatctgcgctcagctgctaatgctggccgccgaagacccgaagaaggatatctggctgtacatcaattcgccgggcggctccatcaccgccggtatggccatctacgacaccatgcagctcatcgagcccgacgtggcgaccgtgggtctgggcatgtgcgcctccatgggccagttcctgctgagttccggcaccaagggcaagcgttacctgacctcgcacgcccgtgtgctcatgcaccagccctccggcggcattggcggcaccgccaccgacgtgcgcatcaacgccgagctcatcatggacatgaagaagaccatgagcgagctgaccgccgaacagaccggccataccgtcgaggaaatctaccgcgacaacgaatacgatcactggttcaccgctcaggaagccctcgattatggcttcgtggataagctcgtgaccacgccggacaccatcggcaacaaccagcagggggagtgagacttatggcaagtgaagaagcaaagtttgccgcccgcgccgaccgactggccggccgccagggtgtagccggcttcatgccggccgcggccccaaccaaccgctacatcatgccgcagtttgtggagaagaccccgtacggcatgaagacccaggacgcctactcccgcctgttcgaggaccgcatcatcttcctcggcgtgcaggtggatgacgcctccgccgacgatgtgatggcccagctgctggtcttggaatcccaggatccaaaccgcgatgtgatgatgtacatcaactcgcccggcggttcgatgacggccatgaccgccatctacgacaccatgcagtacatcaagcccgatgtgcagaccgtatgcctcggtcaggctgcctccgcagcggcgattctgctggcttccggcaccaagggcaagcgtctgatgctgccgaacgcccgtgtgctcatccaccagccggccatcgaccagggcttcggcaaggccacggagattgaaatccaggccaaggaaatgctccgcatgcgcgaatggctggaggaaaccctcgccaatcacaccggtcaggacgtggagaagattcgccgcgacatcgaggtggacaccttcctgaccgccgacgaagccaaggattacggcatcgtggacgaagtgctggctcaccgccagtaacggtctcaaacatgtggacgaatagtgatattcgtccggacactaggcattgcaataccctcggtcggtctgaccgggggtattgtgttgaaaggcgacggcaatgtgtgcgtcgtgtaaacatacagacaagcacagcaggcagtgcggtattcatcggcaaaggagatctcatggggcgtgtggtgagctacaacgaggacattcctcgctgcacgttctgcggcaaaaccgagcgtcaggttcgcaaactggtggccggtcccaatgcctccatctgcgacgaatgcattgccctatgcgtggatatcatctccgaggagcgtagcaaagacgccgaagtcaactcgctgagcctgcccaaaccaacgcagattttcgattatctcaatcgatatgtcatcggccaggaagaagccaaacgggcgctttccgtggccgtgtacaaccattacaagcgcgtcaatatggagttgcaggaatccgccgaacaacttgacggtgcgaacggcaatgccgcgctccaatcagccgggcgagcccgcaagtctcagcgggctaatgatccgctatcggatgtgaaagtcgccaagtcgaacattctgttgctggggcccaccggtgtgggcaaaacctatcttgcccagtcactggcccgtgtgatgaacgtgccgttcgtcatcaccgatgccaccacgctcaccgaagccggctacgtgggtgatgacgtggagaccgtgctccagcgtctgctgcaggccgcggacggcgatgtcagccgagcccagcacggcattatctatattgacgaaatcgataaaatcgcccgcaaatccggcgagaacacctcgattacccgtgacgtatccggtgagggagtgcagcaggcactattgaaaatccttgaaggcactattgcttccgtgccactggaaggcactcgcaagcacaaagagcaggacacagtgcagatggatacgtgtggcatcctgttcatctgtggcggcgcattcgtaggattgacggacatcgtgcgcaagcgtctgggccgccgggaaaccggttttggagccaattggcatgacgccgacctgaaagacgaggagctgcttaagcaagtcaatgccgatgatttagccgaattcggtctgctgcctgaattcatcggtcgactgccggtcaccagcgtgctcaaggagctgacggtggatgatttgacggagattcttacgcagccggccaatgcgctgattaagcagtaccgcaaactgtttgccgtcgacggcgttgatctggagttcaccgaccaggccgtccaagcgattgccgatacggctatcaagcaggggattggcgcacgaggtctgcgttcgattatcgaacgcaccctgcaagacacgatgttccagctgcccagtcttgaggatgtcaagcaggtggttgtcgacaaggcatccgtggaaggcaccagtgcgccgaaactgctgcgtgaaacggtcatccaggaatccgcggagcgtcgtcgtacagcatgattgtcggatactgtgactcgctgttcctgtgacacgccgagtaaccaatgggttgcacaaacacgaaccttgagtaatatgtatcgagttgtctgaaagacaatatgcgccagtagcccagcggattagagcagctgactacggatcagcaggtcgcaggttcgaatcctgtctggcgcactcccgaaccacggggacaacggtggtatgcgccagtagcccagcggattagagcagctgactacggatcagcaggtcgcaggttcgaatcctgtctggcgcacgataaagcctcggaagcgaaatgccttcgaggcttttccaattctcgttacatacctcctttacgatgggtcaggtttgttttcgccggtagtgaagaaggagaaacagtgattctggcacagcatgccccttacgatttcgatacgattcttgagcgtcatggctcttcgtccgccaaatggcatgaggtcgtggaacagatgggtgaggacggcaaagatgtggtgcccttgtccgtggcagacatggaattcaaaccggctcctgaagtagtcgaggctctcatccaatctgccacccatgacgtattcggttacgattacgccactgaagactacttcacagcttttctcaattggatggagcatcgtcataatttccatatcgacccttcatgggtgagcctgtccgacggcgtgatgcctgccgtcaacacggccctgcgatccgtcacccgaccgggagataaggtcattatccagcggcctgtctattacccgttcacctttgccgccgagcacaatggtttgaccattctcgacaacgagctggtactggacgagaacggccactatggcattgattttgatgatctcgaatccaaggccgccgatcctcgctgcacggccatgattctgtgcaatccgcacaacccggtgggccgtgtctggacgcctgaagaactgcggcgcattggcgatatctgtatcaaacgccgtgtgcgtctgctgtgcgacgagattcacgccgacttttcctatcctggacataaggtcaccatgttctccacgttgggggctgagtacgcgaatatcgtctttgaattcaccgcgcctaccaaaaccttcaatctggctggtctgttgtgctccaacaccatcatcccgaacccgcatctcaagcgtcgttacgatgcggcggcggataatatcggcggcctgaccgtcaaccatttcggtatggtcgcatgccaagccgcctacaaccatgccgaaccgtggctggacgcactgatggaagtgctggaacgcaatctcgggctcatccgcgacttcactgcacgtgtaagcggcattcgtctgattgaaccggaaggcacttacttggcttggctcgattgccgaggcctgggcttcgatactcctgaagaactttgcgattttctgcgcaatgaggcccgtgtgtggtttgatgaaggctcgatgttcggcgaatctggaaacttcttcgagcgtgtcaaccttgcctgtccgaccaggctgcttgaacaggtgcttgccaacatcgagaccgctctggctgaccgtcagtagggggggtacgccccgggctgaacgtcctgagatattccgtaccatagcagcagatcattcattatcgagcgaggagacgcgatggccacaaccaccggcgcaaaacgaggcatttggcccatgatcaggcggatagccgcctctgatcgcatatctggactgattatgctcggttttgcccttgccggtctggttctggcgaatcttcccctcaccgcgcatgcatttgaggccgtagcggaaacgcatgtgttcattccgcataccaatcttgatctgccgatcggccattgggctcaggacggtttgctcactatcttcttcctgactgttggcctcgaactgaagcaggagctcaccaccggctcgctcgctaatcccaaggcggccgctgtgccgatgctgtgtgccgttgggggcatgatcaccccgcccatcctgtttctggccaccactgcactgttttcgcagttcggcccgggggagcctggctcattgatcctggccaccactggcagcagcatcccgttcgccgagatgtcccacggctgggcggtgcccacagccacggatatcgcgttctcgttggcggtgctcgcactgtttgccaaggcgctgcccggttcgatccgcgcattcctgatgactttggccacggtcgacgatttgctggccatcatcctgatagcggtgttcttctcctcggtcaatgcttggtactggttcattggcatcgccgtgtgtgccgtggtatgggcacatctggttcgtcttaagaaagtgccatggatcgcggtgggcgtggtcggcatccttgcctggatcatgatgtttgaagccggcatccatcccacgttggccggtgtattggttggtttgctgaccccggcacgtgtgatgcacggtgaatactcaccgcgcgccgaacgatatgcggacaagctcaagccgttttccgctctgctggctttgccgattttcgccttgttcgccaccggcgtacattttgaatccatgagtccgctgttgctgctctcgccactggtcatcgccctgattgtggcgctggtggtcggcaagccgttgggtatcatcgtcaccgcttggctggccacacatgtcggagggctcaagatggccaaggggctacgcgttcgcgatatgattcccgctgccgtcgcctgtggaatcggttttacggtgtcgttcctcatcgcctctctggcctatacgaaccaggagctgtccgccgaagcccgattcggtgtgctggtggcctcgctgatcgccgccgcgatttccggcgtattgttgagccgccaatccaagcgatttgaacaggctgcggccgttgcagctgctgaggctgacgccgagtccgacgtcaatacgcattccgacgagctggcggagcattccatcacccttgcggacggcacggaaagcgttgaaatcgacttccgtcgttaatctgcctaggatactgctagagccccatggaggtaccaaatggcgaagaagcagaaaaaatcccaaaaggccgatggcaaaaaagcatccggtataaagcagccgacaaacaccggtgttgacgggaatccgaacgtcggaacaattgccgaagaacaagccaacattcaagtcgcacagattccgatgaatccggttgatttggaggacgccgcgccgctgggggacacctatcatcgaggcccggtgattctgcgcggccagatgattccttcggacaacaccaccgcgaacctgctcaagccggatcaggataccgattggctgcatatggatccgtggcgtgtgctgcgcatccaatccgaattcgtggatggcttcggtgcgcttgccgagctggggcctgcggtatcgattttcggctccgcgcgcacacaacgcaccgaatcggactacaaggcggctcgtcgcatgggcagccagatcgccaagcgcaatatcgccgtcatcactggtggcgggccgggcattatggaagccgcgaacaggggagcggcattggcgggcggcaagtcggtggggctcggcatcgaacttccgtttgaacaggggctgaaccagtgggtgaaccttggcatgagcttccggtacttctttgtcaggaagacgatgttcgtcaagtattcctccggtgtgatcgtctgcccgggagggttcggcacgttggatgagatgttcgagctgttgaccctggttcagacccacaaggtggcgaacattccggtggtgttgtacggtaaggattattggcaggggctattcgactggttggatgggccggtcgccgagcgtggcatgatttcgaagatagatcccaagctggttaccgtgactgacgatgccgacgaagccgtggacgtggccacgagtatggttgtctgagggcatttggctcccctccgtcaagggaagccaagaaatattacttcttgtatgcgatgagcagtccggtaccatccggagtaagtgtggattcaaattcctcatcctgctcgacggtagtgatgagctcgcgcatggccgtggccttgccgctgcggtcggccgggttgatcacaccgccctgctccgtatccaaagccaatgcgtccgtgaatacgatggcaccatgatcacgtagcaggcgggacgcctgggcgaatgtggcggcataattctccgcatcgccggccaccacaatcaaatcgtaatcattggcattgagcctgggcagaaacacactggccggggcattcaccgcacgaagcgtggtagcggtctcgtcctgcagttcggcaaacgccttgcgaatcagtgtgatgccctgtgcggtggaatcgacggcggtcaactgtcccttgttgtccaaggcataggcgagttgcagagtctccaccaaggagccggtgcccacggcgattaccgaggaggctccggtcaaacggaccagcaggcccaggagtcgggcttgtgcggctggaccttgcagttgtccggattcgtcggcggcggtacgggcatcagccagtgtggacggttcaagttcgcgagcacgttcttcggtgaattcccatgccttggcgagattcgtgtactgtgttctgtccataaccgttccttcgatgttcgttctctcagactatgactttccggtatctacccggcaatgattcagcgttcgcggactttggccacgatctgccacatttcctcgcccacatcgataccgcgcgggcagtggcgggagcaggcacgcaccgattggcatccggccacaccgtcagcggtatcaatggcatccatgcgatctatggccttggtatcacgtgaatcgttgatgaagcgggaagcccagatcaatgcggccgggccaacgaatgcatcgccgccggcgtataccgggcaggcaccctcgcacacaccgcaggcgatgcaattgctcagcgtctcatacttggcgagctgttcggggttctgcaggtattcgaaaacgtccactttgccttcggcggtggtggcaagcacgccatcagcctgaagatacggggtgagtttacgaatctggttgagcatcgggtcgatgtcggcgatgagatcacgttgcggcgggaatccaggcaaggaagccagttcgataacacccagagaaccttcagggatgttgtttttgacgttttcggcgggaacgtcgggttcgttagcggtttcgtcgccggtgcgtcggaatccctcatcatcgacttccggagccgtactaggctgcttggcccagtcgcggacggtggccgtacacagcagagtgggtgtgccgttgatggctgcggcatcagagccgcacatgccgtgaccgcatgaatagcggaaggccagcgtcgggtcgatagtgcgtttaatggtcagcagacagtcgagcacggtgtccgatggacgcgcgggaatggtgtattcctgcacccactgcttgccacgcgggcggcggcgtgccgccgaatccgagccgccaccgaacggggagcttttcttggcgaacgggctgccgccgcgtgcacgttcggcgcgctcggggcgcggcgtgaaacgatgcacttgcagggtaaccgtcgtgttgttcgcctcaaccatgttctgcctccagaaaccgtggatatcagttcgattattcgacaatctattgtgtcacaagccctgggcggcttagtattcacgcttcttgggcgggtagtcggtgatatgcaccggcttgaagctcaccgggccggcatcggcgaccaacgagtgagcgaggaaatgctcatcatcgcgttcggggaaatcaagacgctgcagggacccacgagattcctgacgagactcggaagcgtgcaacatggcctcggccagctcaatcaaatgccggacctcccagatggcggtgacctcttggttgaaggcggcagttttgtcatgtgcccgtaagatatcggaaaccggcttgatgtcgctgttgagctgggccagagccgtatcgatggtctgagcggtgcagcgtacagccagagcctgttccatcactgatccaagttgggccatgagctgataaggattggccgtggaaccctcatcgacatcatcggcttggccggcgagcagctcgtcaagttcggacttacgggattcggcggcatgatcggcggccgtcgtcaacatgtcatcggccgaatcatcggccatgggggagtcgaccggattctcggcgatacgcgtggccatggtttggccggcgcgcgtgccgaacagacatgcgtcaagcagcgaattgccgcccaagcgattcgcgccgtgtacggaaacgcaggagcattcgccagcggcgaacaagccatcgacgatttgcacggcatcgtccgtccaacggtacacctcgccattggtggtgatggggatgccgcccatcgtatagtgcgcggtgggcttgatgggcaccaggtctttggccggatcgaggttcgcgtactgttcgatggtttcggccacctgcggcagcacttccttcatacgttcagggtcgatgccggtcatatccagccagacgcagtccttcggaccatccggatccttcgggtcggcaacgccgcggccggcgtcgatctccgccatgatggagcgggagaccacgtcgcgcgcggccagatccttatgctctggagcataacgttccatgaacggctcgccgtcggcattgcgcaggatgccgccctcggcgcgtgccgcttcggaaagcaggatgccggtgtgcgcgagaccggtggggtggaactgcacgaattcgatgtcttcaagctgcaggccggcagctagggtcagcgccatgccgtcgccggtcaagtcccaagagttcgacgtggtgtggaacagtcggcccgcgcctccggtggccagcagcacattgcgcgcgtgaatggcctgaatcttgcccgtatgcgtatcaaaagccacaataccggccgcctgcttgccatcatcggcgagcaccagatcggtcacataccattcctcggcaaactcaacgccggcggccacacactgctgccacaaggcgtgcagaatctggtggccgatacggtcggccgcataggcggcgcgcttgaccggggctccaccgaactcgcgcgtatggccgccgaatcggcgctgtgcgatatgcccgtcctcggtacgggagaaggccacgccctgacgctccagattgatcacggtctgcggcgcatactcggcgagcagcttggccgcgtcctgatcaacaagccagtcgccgcccttgatggtgtcgtagtaatgccaatgccagtcatcggactccacattgcccaggcttgcggcaatgcctccttcagccgaaccggtgtgcgaacgcagcggctgtagtttggagaccacaaggatcttcgggtccacgccttgttccttgagttcggcgatttcgggggatcgcagcagtcccaatgccgccgacaaaccagccgcaccggcaccgacgatcactgcatcatacatatcttccaaacgtttcggactcatggattcgattcttgcacacccgccgaacagcgccgtcatcgtgtcatgagggtgctgacaattcttgttctagcggtgtgtaagactggcgtctccatgattcagatgaggcgacaactgagcgtgaccgttccggtctcccggtgaatcgctcctcgcagttccagcgctccgagcagttccagtacggtggcgatatccggtatttcctcgaggtcgttattcctggccgcgcgcagcagggtgtccggtgtgatggcgaggcgatgcgtacggcattcgcggataaggccgaccatcaagcgttccgcttccgacaatgtgctgacctgtatcgtctgttgcgcttccgcatcgggctgcaacgatgcctgggcgcgcaaatctggcatgtggtgggatgaggagaaatccttggagtctgtgcgagacggcaagggagtcgtgatgacagcctgggatagcgtaggctgctcggatttcttgtggaccgccttggtcgtacacgaaggcgctggatcactggcatcgcgctgtgcgttgtccgccatgcctgggcatcgttccataatcggctgatggcgcttgtgacagatgtctttcgtggaggtggcggcgcatagaatcgtggcctgatggtcgccaatcattttgttgcagccggcattgcatggctgattgatgtctcctggcactgcatacacctcgcgcatcagctcgcaggcccagcccgcagtattcagtgcgcctgagcgcaatctcgcctgtgccacaaccagtgtggaagacaatgccgcgataatacggttgcgcagcaggaatctgcgcgcctcgggaatggtgccgggacaaagttcgctgatgagcgcgcctccctgcgattcgatgcgttcaaacagtgtgcgattgcgagctggccccatatggttcagtccgccggcgaatacggcgacggttctgcccacgcatcctggtttgcggccgtgcagagcgttcagagcaccccaatgagcggccgcgtccgtgcccatcgcgcctcctgaaactaccagatgaccatccaccgcggcttgctcggcaaccgtatgggccacataccgtccgtactcgttgacgtctcgggagccgacaatacccaccggttttgcgcagctggtcagggcccgcggatcgcctttgacccaaaggcataagggaggtgcccagtcggagcggatggataggtcggtcaattgcgcaggccagcatgggtgtcccgggccgataatccattgtgtgccatccatggtgaaccagtcggccaaggaaacgatgtcttgcgagggcagggcgtccatccgctgatgccagccggacagggcattgcgaaaagcgttcatcgcgctgggtgtgggtttgcgaccccagcgggtcagaccattgatgaacatgcgatcaatgcaggtcagtgctttttggcgaacatcggaaggccggtcagggtgacactgtgacaagacctgccataatgcctcagcatgttcggctcctttgagtgtggcgtacatcatcgcatccgcgccatcgatgcagaacgtgagcgcggcacggtatagggcatctagtgaaggagcggcgataatacgtgagcgcacggtctgtgcggccgcttcggcttttccgattgtgtgaggggagccgtgaactgaagcgggctcggcaatcatattggtggtactcatgacactctcgttctcatttcgataccttgatggacatcctgttcggtaggggaaatccggccggccagatcggcgagggtccaggccaatcgcatggcacgatcagctccacgcaacgtcagctgctgcgaggacaaggcacgattgaccagttccatcgccttgagcgaggtgttcgcatgcagccacgtgccggatgcctgagcattacatgtccacccgaattgctggaacctatctttggcggcgtttcttgcacgaatcacgcgtgcacgaattgtggcgctggattcgccgagcggttcatgctgcacggtgatgcgggggacgggcggcactgtcatctgaatatctactcggtcaagtaccgggcccgataaacgggagaaatacctcatgcgatctttttcccgacacctgcagcgctcgccagtgccgtaataatatccgcatgggcaaggatttgccgccatgaccagctggaatgcagctgggtaatacgtgcttcctttggagcgggagagagccacatagccggattccaatggttcgcgcaacgtttgcaaggcccgggcgctgaactccggtgcttcgtccaaaaacagaatgccacggtgagcgcgggttatcgcgcccggtgctgcgatgccactgccgccgccgaccagtgacgctgtggaagcggtatgatgcggcgcttcaaacggaggcacatcggtgatgccatattgcgataaggtgccgcacagcgagcgaatcgaagcgacttccagctgttcggtatcttccaatgggcacatgatgccgggtaatcgtgaagccaacatggtttttcccgtgccgggaggtccggtcatgatgaggttatggcctccggcggccgctacctgcagcgtccatttggcatgttcctggcccaacacctcattcatgtctgcgtatccgttttcactgacttcggcttgctcggaggcacttgcatcctccgcgagctgcagatcggggattgtatatgaggcattgcctcccatgagctcgatgagctcgcccacatgtcttacgccgattgcatccatgtcttccaccatcgaagcctcgtcaagattgcgatagggtataattacttttcggatgccgcgttcctgcgcatgcaacatgattggcagtaatccatggataggcagtaccgaaccgtcaagattcacttcgccaagcacaatagtgtcttccagacaatcgtggccaatggctccagctgcgcagagaacgctggcggcaatggccaaatcatgtgatgagccgcgtttgggtagggaagcggggctcatattcacggtcacacgggtttgtggccatgagaaaccactggcttgacatgccgatttcactcgctcgcgcgcttcggacagtgaggtatctggcagtccaatgatgctgaaatatggcaggccgggactgatgaaagcctgtacctggacaatgaaggccttgagtccgatcagaccgaccgaaagggcgctgccaatggccatgcttgatcctttcgctaaaacgcgttttcaatgtgatgcaccagcggtctacccacgcgcaacacgatggtgatgacatcgaatctgacggctttgtgcgagatacggttgcggcaatcaagcagccaatcgcaagcagctttcctgagattctgttgcttggccggcgtcacggcctcctgcgggcagccgtactggatggtgcggcgcgatttcacctcgacgaacaccacagtgtgctcgtcgttgagcatcacaagatccagttcgccgtatcgagtacgccagttatggctcagtgtggtccatcctttcttctccaaccaaacagccgcatatcgttcgccaagagcgccgaactgcttgggtgacaaattgcggtcgcccattgcggctgcgatgtgttccgtggaagttgctgcatcattcatgattccactgtgcgggttggtgatatcgggacgcaagggcgaccggcaaatgtggataccatgacgcggcttggcgtgttgtggacagcgtgtggatgaaagtgcggttatccaccattagttcagaaagtatgtgcttcgctatgtcatccagcggatgacattcgcgatcccgttacctatttgtaagtgcaacgtttgtctgtgggtggcttgtcttcgacattaccttgccgagtttgcggtaccaagcctcgttgggcgtttcccagtccgggaccttcatgggggtgtcgttgatctcctggacgatggcctgcaggtcctcgtccgtgaggtcgtcgagactggtcctcttgggcaggtagcggcggatgcgtccgtcttcagccgtttcggccggtaggggcggtaggactcgttctcgttggacgcgagccacgggccgcgcctcggttcgcggctgacggtgggcttgccgtggctgatcctcagggcgatctggcggaccccgagcccctcgcggttcctcaactcgtcgatccggatgcgttcctctgccgacaggtgggaataggctttcatatcgagcgcgacgctttctttctggttatgaacttgaacacttccaaccatagagcgggtgttgcgcttctatttagaactcagggtgtgggcacttgccggcatactgatatcaagcctgttactggtatgggtacggctggagaacgggaatgcagaggcaatggcgcttaccgacacgctgcttcgggtgccgataagcgtagtggttggtgtgctggttggggcgttagttgccgtactcagcacgcgggaaagccacctgctcaagtacttcaagaatcggtagattgggatgctcccgctagactgagggtggtgcgtgcagatagtagaccaccctcagtcaacttcgttgacagctcccgccagcgggagccaaagtgggtcacttcaccaaattggtgagttctccgagattgagctcgaagctgacgccgcgatcctcgaagtgaggttggttgcgcgtgctttccattgcatgacgcacgaactcgccggcaatctcagcagactcggccagtccgcgaccggccatcaccgcaccgcacagggcggaagcgaatgcatcgcccgtgccgtgaatcatgtacggcagcttgtcatgtgccagttcgatcttgccggtaacaccagtggaggcgctggccacatagttgatgatcttgccgtcgccatggtcgatgcccttcaacaccacgttcttcgcgccaagctccagcagcgcgcccaacagctcgtcaaccgtggcttcatcgatatcctgaccggggtagtcgcgcttggtcagaatgctcgcttcagtcaggttcggcatcagcacatcggcgccgtcggccagcgcacccatcgcctcgcacagttccggcgtatacgtgggatacatttcaccggcgtcgcccatcaccgggtcgaccaaacgtagtgcattcggatattcgcggtagagacgctgaataatcgccacctgatcgggggagcccaggaatcccgagtacacgccgtcaagctcaacgtcttccttctgccaggcatccagatagccggagaggatatccgtggtgtcatggaaggtgaacaccgcgtacttcgtgtgtgcggagaacagggcggtcggcaccgggcagacatcgcagccggctgccgaaagaatcggaatcgcggcggtcagcgagcacttgccatagccacacatgtcatgcacggcggccacgcgcgggatgtacttcggatcgcggtcgtacaacgtaacgtcggacactagaaaactccaatcaatcagacggatgtcacataatcacagttgacactagtctgtagggatacggacacgctaaccggtattcatctggtgaggttccgtcgccgaattcaacagatcgctcaaactcctagcgacagaaatcttggaaataaaaccatccaccccaaaaattccgttgctggttccatctgagcgacagaaatttcggaaatcatccctgatcccctgaattgctgtcgttgaatccgtctcagtgacagaaatttcgggaataaacccattcgtcctgaaattctgtcgctgacgtcacctcagtgacaggatttcaggaaattgaggatgatttcctagatttctgtcgcgaagagacgtggaagtgtctcggcgtgtcgtgagatttttgatgactattttgcccgacgtaaccgcctcatatcccaatgattccaagggtttataaaggtctataggcaaccccgataacgctcggcttgcgacatgcaccttgagcgtcgtaacttcataaccaacacctcgccaaccgcccgaacacggcaggcgggtggcaaggaaaatatcctcgcgacctagcacaaccaaggagaataccatggccgagaacaacaagaagtaccgttttgagaccctgcagctgcatgtgggtcaggagcaggccgacccggccaccgactcccgcgcggtcccgatctacgctaccaccagctacgtcttccacaacttcgaccacgccgaggcccgcttcggcctcgctgacccgggcaacatctacggccgtctgaccaacaccacccagggcgtcttcgaggaccgcatcgccgcccttgaaggtggcaccgccggtctggccgtcgcttccggcgccgccgccgtcgaatacgccgtgcgcaacatcacccagtccggtgaccacatcgtcgccgccaagaacatctacggcggtaccttcaacctgctgcgccacaccctgccgcgcgacggcatcaccaccaccttcgtctccgccgagaacccgcaggagttcgaggacgccatccaggagaataccaagctcgtctacttcgagaccttcggcaacccgaacgccgacctgccggacttcgaagccatctccgaaatcgcccacaagcacaacctgccggtgattgtggacaacacctttgccaccccgtacctgttccgcccgctggagcatggcgctgacgtcgtggtcgagtccgccaccaagttcatcggcggccacggcaccaccctcggcggtgtgatcgtcgaaggcggcaagttcgactggaacgccgttccgggcaagttcccgactctgaccgagccggatccctcctaccacggcctgaacttctacgaggccctcggcggagccgcctttgtgacccgcgtccgcgccattctgctgcgtgacaccggcgccaccctgtctccgttcgctgccttcctgctgctgcagggcaccgagaccctgtccctgcgcgtcgagcgccacgttcagaacgcgctgaaggtcgtcgagtacctgcagaccgtgccggaagtcaagtccgtctcccacccgtccatcgagggccgtccggaccacgccctgtacgagaagtacttcccgaacggagccggctccatcttcaccttcgacatcaagggaggcaaggacgcggctcgcgtgttcatcgacaacctgcacctgttctccctgctggccaacgtggccgacgccaagtcgctggtcatccacccggcttccaccacccactcccaggagaccctggaagagctggaggaccagggcatccaccagggcaccatccgcctgtccatcggcaccgagaacatcgaggacatcctcgacgatctgaagggcggcttcgaagcccttcgcgcttccggcttggccaagtgagatgacggaaaggtgctgaggtaggaaggggagcgacacttatggggtgtgccgcacaataccgaagcacatggggtctttccgccaaataacttgacccaaggagaggaaagcttgcactgacgtcatgcagtgcgagctttcttgtgtttgactgcacagcgaatgatcctcaataggaaaagtgtgagtcaaacgcacattatcaatcaatcgcacatatcgtcgaaccgcaacataaggccgattccggaaaacccgtgttcgtttctttgctaataggcttcacagttttcttattgaaaaccattcgctgcgcatataatcccgtaatccttgaggatgaggatgaaccgataattcagcctggcgcacgatggggagcgccgccgtttcttcataagttggaatcatcatccgggcaatgggctcggtcaaattatggagagacgtcatgaacgcacaaaaccccgccgcatcacacggcatcgccattcaggccgttgacctcgtcaaggactacggcaccggagacaacacagttcatgctttacgcaacgtgaacgtgagtttcgaacgcggcaaattcaccgccatcatgggcccgtccggttccggcaaatccacgcttatgcacacgctcgccggcctcgactccgccacttccggccatatcctgttcggcggggcagacctgacccgtatgaacgacaagcagctcaccctgctacgccgccacaagatcggcttcatcttccaaagcttcaacctgttgcccatgttcaccgccgaacagaacatcctcatgccactgactctcgccggagacaagcccgaccgcgcctggttcgacctgctcgtcgaaaccctgggactgaagcagcgcctgaaccaccgaccgaatgaactgtccggtggccagcagcagcgcgtggccatcgcccgcgcgctgattaccaagccgaagctggtgttcgccgacgaaccgaccggcaacctcgactccgtttccagcgccgaagtgctcggtttcctgaagcgttcggtcaacgaactcggacagaccatcgtcatggtcacgcatgatgcggtggcagcctcctacgcggaccgtgccatcgtgttctccgacggacggatcgtggccgacgaacagcatcccaacgccgaagtcatgaacgaactgcttatggccgagcgagagcgcaccacccgcaccactcttaccgatactcctgctgaccagatggcacagatggcaggcgtgcgcaacgtgccggatctgcccatcaccgatgcgccgctgccgccggccgttcccacctctgggcgtgatggaacgctgcgccacgcccgtgccgccgcacgccacgcccgctgacccacggaaagcaagagagtaggacgaacccatgttttccatcacagtgaaactcatgaagaaaagcgccagaatgctgattccggccggcatcgccatcctgatcggcaccgcgttcattgcggccacattcctgttcggtaacgccatgaacgattcactggcccgtcagaccaccgcgcagcttggcggcgcgaactatgtgatcagcgctaatgccagcgatggactgagcgaacaggagcagaatgacatctacgctcgcacggtgaacgacttccaactcgaccgtatccgcgccacagaaggtgtcaaggatgtgcgcgtcgaatcctcgagttccgtaaccgtggccaatggcgataagcacgccagcagctatgccatcaccaccgccgcacagcgtgatctgctgccggtcagcatcattcaaggcgaccagccggtcgatagcaacgaaatagcattgactaagtccgtggccgatcagcttggtgtcaaggtgggggatagcgtgaccgtgaactcccgtaccgcgcaggccgtagcttcgacgggctacggttccgccggcaacgacactgccgctgattccggtatgaccgttcgcgtagtgggtatcactgaagatccgaacggcgcctatgcgtactacggcggagcctcagtgctttccgataacgtgatcaccgcgatgaacggtatcgacgatttcggcaaactcaatgtctatcttgtctacctcgatatcgacgatgccgatcagccgtccgccgacgccaccgcgaaacaaatcgacaagctgctgccaaaacatttcaccgtgcaatcccgcgcagcgatggaagaggaatccatcaaatccgtgagcaagggcgatacgagtatcaccaccatcttcctgctgagcttcggcatcctcgccatgctggtcgcggcgctcgtcatcgccaacactttccaagtgctcgtcgcccaacgccgtcgcacgcttgccttgctgcgcaccatcggcgcgaacaaaggccagctgtatgtctccgtactgttcgaggctggtctgctgggactcatcgcctccatgctgggcgtgggcctcggcatcggactgatggcggcgctgtgccaatccggcctgatgaaagccaccggcatgaccatgagattggtgctgtcctggccggcattcgtggtgccgattgcgttcggcatcgctatgaccgtgatcgcctcgctcggctccgcacgttccgccaccgccgtgactccactggaagcgctgcggcccatcgaactgaacgatacccgtcgggccggtaagatccgtgccatacttgcgggtctgttggtgctcgtcggcatcggtctggccgcattctccgcctggcagatgaacgaaaagatcgccggacatgattcgctggccgacaagcagtatccgatggtactgctcgccgccatcgccggctgcgcgctgatcttcctcggactggtgctttccgccacattctggctgccggtattgatgcgcggtgtgggcgcgctggttgcgtttgccgggccgtccgccaaggtggcgcatgcgaacatccagaagaatccgcgccgcgtggccgccaccggtgccgcactgcttatcggcgtgacgctggtctccaccatcgccaccggtgccgccagcgccaagcaaaccatgaacgaggcgctgaccacccgctacagcgttgacatgattgctgtcggtgctgatatgaccagcaaacaggctgatgaggtcgccaagattaagggcattaaggatagtatctacgcgccgactcgcatgatgagcatgaaggatgccaatggcaaggatctgaacgtactcatcgttggcgtggatggtgttgacgcgctgcgcaaagtggtgcgtgccgacctgtccggcgtgaccatcagcggtgactccgtacttatgcccaagtattccgctgccacgggcaaggacattccgctaggtaagagcgtcaccttcaccagtgatgtatccggctcgcagactggtacagctgatgctgccgcgagtgatactgagaacgatggcggacaatccgatggagtgcagacactgaccctcgcgccgcagaaggtggattatcgtcgcatctcagccaactatgccgcagtcgccttcgtggatgccggtcacttcaccaacggtgatgtaaaagcgaacggacatatcatgcttatgcgtatcgacgccgaaagcgcgggcaccacgctgaacgacgtattcaccaacgtgcagaatgcattctccgccagtgcagacattgacgtgtctggtccggtggccgaacgcacgcagtgggagaccatgatcaacggcatgatggcgttgcttgtcggcttgattgcggtggctgtgcttatcgcactggtcggtgtggcgaacacgctgagtctatcggtgatcgaacgcacccgcgaatccgccaccctgcgtgccatcggtatgacgcgcggccagctgcggcgttcgctggcagtggaggctttactgctgtcgctcgtctccggcgtggtgggtgtggtgctgggcaccctgttcggctggcttgggtcctatatggtgttcagcctgtatggtgacactgtgttcccgttcgagtggaccaccaatggtgcagtgcttggcgtggcggcgcttgccgcgctgctcgccagtgttgcccccgcccgcagagccgtcaagacgccgcccgtcgaggctttggctgaggcctagtggcccggtcatagtctaagagcgaagagataggtctattcgtatgctgcgaatagacctatctgccttgaaagaggtacattcgttcctttgcggaaagctatctgctttcaaaggggtaccggatatacgaaaacgcgagtacaaccgttggaattgcaatgatcgtactcgtgttatcaggtctcggatatctctctgaaagcagatagctttctgcagaaaggcgaatgtacctctttcgaggcggataccacttgttctgccgtatcgtgcgtattggggaagtcacaccaacccgttatcgtacgcaaagaccacagcctggacgcggtctcgggcgttgattttggccagaatatgcgccacatgggttttgaccgtgggcaaggagatgaagagcttgtccgcgatctcctgattgctcaggccatgggcgatttccaccagcacctcacgttcgcgatctgtgagcagtttcagctcgggatcggtatatgtggggcgtgcggtgccaatgccgttcgtcgaatcggcacccgtagctccgaccgttccagtagtgtcggcgacgccgccagcattgccattgaaacttgcgttcgaaacgccgccactcaacgacccatgctgcgcatagccgtcttgcatcattttctcgatcagacgcttggtggccgaaggcgcgatgatcgcattgccctggaacacggtgcgaatcgaattgagcagcgtctccggttcggtgtctttgagcagaaaacccgaagcgccggcattgatggcggccatcacatattcatccaaatcgaatgtggtcaggatgatcacacgggtcggctgcgtgccatccgtgccggcggtcagcgaagtaatacggcgggtggcttcgatgccatccatgcccggcatgcgcacgtccatcaacaccacatcggggtgcagggtctccgccatcgtcacggcctcggcgccatcggacgcctgagcgaccacttccatatcttgctgcgagccgattaccatggcgaagccggccctcaccagctcctggtcgtccgcaatgatcacgcgaatgcttctgctctcgttcatgctctccactgtatccgattcctattcgagtgccgctccatggacaccctgattgttccctgagttcatgttcgtggacgaatccgtctgagatgtggattccgcctgcctcatctggctggacagaggagcagccggtcgcagttgcatgtcgggttgtgcgccttcatgcatctcgtcgctgaatccggtttcacgcagcaccgtcagcaattgccgcatgtgcgccagagccgcacgcccgcgttccccgatgaccgtgaacgcggcgatgatctgctcgctattgggaaccggttcggagttcagcatggccagcccatcatcggcttgcgtgatcaccgattccaacgtattcaatacctcggcctgcatggccgtgccgatgcgattgcgctccagattggcggccagcaccttctgccgctcctgctcggccttgagcgcctcctcgcgttgcatgagcgccagcgcgttcgagccacgtgaacggctccaccgggccatcgcaatgcacgcaaagccaaacagcatcaccacgccacccggtatcaggccggaaagcaccagtagccagcgggacatcgccgattcgccgttgaggggcagcagcatctgaatcagcatgtcatatccgttccagccggacattgccttgatgccggccagccacgaatccgcgaccagcgccacactgacccatttccatgcctgttcccgtccatacagtgcggcggcgtgtacggacaccaatgcaaacatgttgacggtcaggatggatggcaaaaacagcagctgcacggcggacagaatcgccatgaccagtgcgctgccctccgggaaccgacgtcggaaagccagaggggcaagcatgatgatggtcagtgccatggtcagcacagtgttgggttgaactgggtcattgctgaccgtcatcatctgcagctcgttgcgtgtcgcggaactgaacatcgcgatcagcgccacggtgatgagaatatccgccagcagataatgccgttcggtccattgtgcgaagcgggccacccaattcgactcaccgatatctccctggttgagcggtttggagcgtatcgaatccaggagtttccgtagtcgtgtgatggtgacgggcaaagcgtcagacggctcggcgtcggtttgcgcgatttcgggggagaggggaatcgtagccgccacgatgaacccgccgttcggtccagggccggcatggatgctgccgcccaacgattcgatgcgctcgtgcatgcccatcagaccatagccgggtgcgtgcccgtcggcggcggatgccgctccctggccgttgtcggacacggtaatcgcaagcccgtcatccgaccacacctcatcgatggtggccttcgcgccctcgcccgcatgcttgcgcgtattggtcagcgcctcctgtaccaagcggaacacggcggcatccgcatcggaggtcaaacgatccggccgtgacttgcctgtcacacgccgggatacgaccagatgaccgtcgaacagagaatcgatgtccgcatacccggcatcatcatccgtgccgaacacgccgaacagtcgctgcatatcatgctgcgcgcgttccgcttcatggcgaatcgtgctcatcgtatgcttggcgacggccagatcatgcgtgcccgcatatcggccgccatccgactgcacgataatcgtcgacagcgtatgggccaccacatcatgcatatcacgggcaatgcgcgcgcgttcggccagcgccgcgatatgtgtctcctccgcttcgcgggccactatggaagcattgcgtgcgcgcatggccgtgagcgtggccttgcgcgcacgctgccataacgccatgatgataatgctcagcacgctgatttccatgcacagcgccagcacgcccgtatcccgcagcattttgattccgcagttggatacgctcggctcgctgatgagaccgggagaggccgggcatatgggcatggtcgcagcggtgggcagccagctgatccaggcggtccaagcattggaggaaccgcttttgaacagcgggccgacgttcattgacaccgcccagaccgcagccgcggccaatcccatggcaaaggcggtgataatgaatcgcaaggaatgcttgggattgccgtacacgagcaccgaatacaggatgataagcgtgtacaagtcgccgtaggtcatcgacgggccgaagacgagatgggcggcggtcagagccacgaacaaccaagcggcgatctccggctggtatcgtcgcagcatcagcggaacaaacgtcggtagcgaccagaacaacaatgaataattgttcgatacgaataatagtccaggagtcgaagaggaactggtggaactgatgagcgggatgagtccgaatgtcagtactgcggcgagcagggtgtcccatagcagggtgtgactcggcttccgagcgaaccatgccctcacgtgcgcgaccatttccatacgtcccaaggctaacgtgtccgttaacaagccgacatcacccttcagacggatttgtgggctagagtttgagccatgacattgctgagcaaatactatgtaccgggcctcgccatcgaggaccattccattgacgttcctctcgcttggtccggccatgagccaggccaagcattcgacggcgaaaccatcaaactgttctaccgtgtggtcaccacgcccgaacacgtgcacgatgacctgccgctgctgatcttcctgcagggaggtcccggcggtgagggcccgcgtctgaacagtcccacctccgatggctggattgaagaggccaccaagcattttcgtgtgattctgcccgaccagcgtggtgctggtcgttcttcgcgcgtggacacgcacaccatggcccgtattgccgccgcccatgaaggtgatgtcgcagccggcgctcgcgcccaggccgattacctgaagaagttcctcgccgattccatcgtgcgtgacttcgagcatctgcgtttgaccgagttcggcgggcgcaagtgggtgacaatgggccaaagctatggcggcttcctgaccctgaccacgctgtccctgttcccggccggtgtgatcgccagcttcaccaccggcggcattccgcacgtgcccgcctgcgccaccgaggtctatgagcacaccttcccgcgtgtgattcgcaagaccgcccagttctacgagcgttatccgcaggacaaggagcgtgtggcggccattgtggagaagctgccgaccgccgcggaagtctccgagttcgtgggcaagctgaccgattccgtactgaacccgatggcgggaaccgaagtcgaacatcgtctcggcgtgatcgccggcatggcggcccacggtttcccgatcatgcccaacggcgacccgctcaccgtggaacgtctgcagtgccttggctccgacttcggtaagaagccgagtttcgagcgagtgcattggatcctcgacagcgccttcctcgatggcgacggctccgtttccgccgcatcgccgttgtccgacgaattcctgaccaaggtgatgaacgccacctcatcgcgtccgctgtactggccgttgcaggaattcatctacgccaacggcgagatggaccagccgattcgctgggccgcccagcgtgtgcgcgacggcaagtccgagttcggtgccgatgtgcgcccgctcaatttcaccggtgaggccatgttcccgtggatgttcgagcaggaggccgcgctgcgcccgttcaagcccgccatggacctgctgatggaagacacgagcttcggcgtgatctatgacgaggaccagctggcacgcaacgaagtgccgctgcaggccggtgtctacttcgacgacatgtacgtcgactcaggcatgcaactcgacacattgagccgcgtgggcaacagccattattggaccaccaacgagttcgagcacgacggactgcacggttcggtggtgttcaagcacctctacgacgaagccctcaaccgaggcgacctcgaagaactgttctaacctttttggctcccctcttggaggggagctggctcgcggagcgagactgaggggagtatgtcaagtgcggaaaacatccctcagtcagctccgctgacagcccccttagagagaggggagcccaagtacggacgaaaggaaatcttatgacccggaatctcaccattggattcatcggatacggcaacatggctcaggccatcgcccgaggtcttgtcgacgcgggcgtggtcaccggcggccagatggtcgcttgcgccgcccgctatgacaaactcgagaagaccactgccgagctcggcgtgcgcccgttgcacaatccgctggaagtggtggtggccgccgacgtggtcatcatcgccatcaagccttatcagattgacgccgtcgttaagccgctcgccagcgaactcgccaagcctggcaaaatcgtcgtctccattgcggccggctggaatctcaagaaatatcaggatctgttcaccaccgaagacggcgaatccgtcgactctccggacatccacattcaatgcacgattccgaatacgccgatggctgtgggcgagggcgtgctcgtcaccgaatccgtcaacaccctgaccgatgaggagaccgagaccttcgagcaggtgttcgcgcccatcagcctcattgagcgcgtggataccgcacacatgaacatcgccatggtggtggccggctgcgcgcccgcattcaccgacatgtacatggaggcactgggtgatgccggtgtgcagtacggtctgcaacgcgccaccgcctaccgcttggcggccaagatggtcgagggcgtcggagcgctgtacatggccaccgaaacccaccctggtgccatgaaggatgctgtctgctcgcctggcggcaccactatcaagggcgttgcccagctcgaaaaagacggcttccgtggcgcggtcattgacgccgtcgacgccatcgtcggctgactgcactcggcaaaaaaattgcccccgccggcgggggctgtcggcggaagccgactgggggtctcccgaatcacaggaccacccccagtcatgcttcgcatgatagcccccgccagcgggagcagtatgaagcagacgaaactactcgatgatcacgtcttccggcttgatgtcggaggtgaagctcggggcgagctcgctctggtaggcgtccttgaagaagccgttggaggtcagggtcttgatctccttgttggtccattcgagcaggctcttgttgcccttcttcacggccggggcgatggtggactcgtcaccgatggtcttgatacccacggtgtagcccgggttgtccttggcccacgcgtacaggtaggtgttgtcgtcggcgagggcggccacacggccatccttgaaggcctggaactgctgggtcttggaatcgaacttctgcagctgaacatccgggtacttctcagtgaagaaggcctcggcggtcgtgcccttggtcacggccagctgcttgcccttgagctgatcggcgctggtgatcttggcgctgtcgggggagaccacgccgatggacaccttcatgtacggatcggcgaagtcgaccacctgcttgcgctcgtcggtcacggtgaagttggccagcaccaggtcgaccttgtcggacttcagcgagtccacacggccatcggcgttcacctgcacccagtcgactttgacgccaaggtccttaccgatctggttgccgagcgccacgtcatagccggcgcgggtgccgtcgttcttcacatagccgtagggcggcaggtcgccgaaggtggcgatacgaatcttgccggtcttcttgatctgctcgacggtctggccctgctgagaggaggagccgccggcagccggatccgggccattgccgcaagccgcgacggaaattagcgtgacgccggcgagcacaccggccaaagctttcttgacattgaacataattctttcccctttatccttttcttgttggttattgcaaatcttgatgattcggcatgaacggagtactcatgcctcaccgccgaccggagccatgctctctaggaagttcctggcacggtcagtttcgggattcgtgaagaactcgtcgccgggctgacgttccaagatcacgccgttctccaggaacatcaccgtgtcggccacgcgccgggcgaactccatctcatgggtcaccacgatcatcgtcatatggcgcttggcgagacgaagcataagctccagcacctcacgcaccatttccggatcgagtgatgcggtgacttcgtcgaacagcatgagctcggggttcatcgcaagcgcacgcacaacggcgatgcgctgtttctggcctcctgacagttcgcgcgggtacgagttcttgtattcggtgagctgcacgtcggccagcagctgatccatctgcttggcgacctcggccttcgggcgcttctgcaccttggtggggcccagttcgatgttcttggccacggtcagattcggaaacagatcgtagctctggaacaccatgccgatttcggcacgcagcttgcgccaggtcttctcgctgttattcgcgatcttctggcccttgaaccagatttcaccgccctgaatggtctccaaaccgttcaggcaacgaatcagtgtggacttgccggaacctgagggaccgagcagcaccagcacctggccgcgcttgacgtcgaaactgacatccttgagcacttcgtgatcgccataggatttgcgcagatgacggacggacagcagcggttcggagtcgttggacacggacacttcttctgaatcagccattgttacgctccttggctcgcttctccagggccttggcgatcatcgccagcggccagcaaatgatgaaatacagcaggaaaatgaatccgtacacccagaatgcggcgtccgggtgggtcatacggttggcctccatgatctgctggcccaccgtgatcacgtcgatcacgctgatgagcagcagcagggacgtggtcatgatgacgcgcgccgccagattgatggtggccggaaccatcaggttgatggactgggggatacgcacgtaccacagcacctgcagtccgttcatgcccagcgccttgccggcatcgacctgatgatcggatacggaaatcaacgagcctcgtacgatatcgctgatttcggccgcgacccataggccgaacgtcacgactgccacggtcacgccgtcgacctgcacgccaagttcgcgcggcaggatgtaataggtgaggaacagcagtaccagcgtgggcacgatgcggaagaactcgaggtacagcctcagcaccgcgcgcagtaccggattgcgcaggatacgcagtgcgccgaggatgatgcccaggggaatgcccaccagcagggccagtccggccaccgtgatggaggtgccgagtccgcccagcagacgggtgaagttgtcgccggtgaacagcacgctggcgccggaggcctcagttatcgccgaaagtaccacgacggaccctcctttccagcagtgtgaggatgacggacaacgggataagaatgattgcgtaggcgatgaccagctccagcaggtattcgtcgctgcggtagtacatgccgatcaggtcgcgtgcggtgttggtcagttccggtaccgcgataacggtgaacacggaggtctccttgaccatgaaaatcacgttcgcggcgacggccggcacgctgcgcgtgagtccctgcggcagggtcacgtgacgaatcatctgcaaaggcgagagtcccagcgcgcgtgcggactcgttctgcacctgcggaataccgctgaagccgccttggaatgcgccggacatgtatgcggagcccagaatggacataccgacgacagcgcagatctcggcgctccatttgatgccgatggacgggaatccgtaatacaggaagaacaattgaatcagcaaaggggtgttgcggaacagctcctcgaatacggtactgatttgggcgagcacaggcacgcggtattcgcgcagcaatgccagcaccaatcccagaagggtggccagcaccacgctgattgcggaaagtcgtagcgtcaagacgaacgcccttccgaacaatggaagacttgcttggatgacttcccagttcacagccggccctccttccgtatacgtagtaatgcttgttgcatggtctctctcaatggttgcgggccgcatgtatggggtaaaacgtagcggctccgtgtgctaccccataaggataacgggtggcgggggtgtatttcgccaagaaaagaacgttcgacgagtgcggataaaggtattgacttggaggtcggggtggtgtattgcaagagccgttgctcgaactcgcagccggctgatgcgcaaaacccagtagtcgcaaccgatggcatgtgattgatgagcttcgcaatatgcattgatgatgtgccggccgggttttgcgttatgaacgccgtttataccctgctatcggatactccgaaatggggatgttcatattgtgcgagtcgagcatttcgcggttcccgtgcgcttgtcgcttggctctttagacttaaaggcatgtctcttactatcggaatcgtcggactgcccaatgtcggcaagtccaccatgttcaatgccctgacccgcaacaacgtgctggccgaaaactatccgttcgccaccatcgagccgaacaccggtatcgtgccgctgccggacgatcgtctgccggtgctggccaagctggttcacaccgagaaggtcgtgcctgccacggtgaccttcgtggacatcgccggcatcgtcaagggcgcctccgagggcgaaggcctgggcaacaagttcctggccaacatccgcgaggccgacgcgatctgcgaagtcgtgcgtgcttttgaagacgatgacattgtgcatgtcaacggcaaggtggatccggccgacgacatcgacaccatcaacaccgagctcattcttgccgacctgcagaccatcgaaaacgcgctgcccaagctggagaaggatctgcgcggcaagaagatcgagccggcctacatggacgctgtcaagcaggcaaagaccatccttgaagccggcgagacgctcgacaaggccgcacgcgaaggccgcttcgacaaggattccgtctacgacctgcatctgatgaccgccaagccgttcatctacgtgttcaacgtggacgacaacgagctggccaacaagaacctgcaggcaaagctcgccgcatccgtggccccggctccggccgtgttcctcaacgctcagttcgaggcggacctgaccgagctcgacgaggcggacgcccgcgaaatgctggccgacgctggcttgagcgagtccggtctcgaccaactggcccgcgtgggcttcgacatcctcggactgcagaccttcctgactgcaggcgtcaaggaggtgcgtgcttggcagatccacaagggctggaccgccccgcaggccgccggcgtgattcacaccgacttcgaaaagggcttcatcaaggctgacatcgtctcctacgacgatttcgtggccgccgacggctccatggccaagatcaaggaggaaggcaagctccgtcaggagggccgcgactacgtcatggccgacggagatattgtggagttcaagttcaacgtgtccaagtagttttcctcggctccccttcctgaggggagccgtcgcggaaagcgactgacgggagtgttgcggaaaggtccgagcagtgttggttgcccagacctttcttcatgttacgaacctttacgaacctcgttgagatgagatgtttgcgtctacttttcttaggcttccgcgttctcgtcgactcctgtgacgagaacattcctcaatgatttcgatacctgtattttcagcgggcgttttccggtctgtacgaccagccccgcggccaagagctcttccacgtatttccttgcgctctgtttggacagtccgatgtgatgggccacttcgtccaacgacatggatttggacgagtcgaacagctcttcctgaatcacgccatagagcaccgagacggcattgcgcgataggccatgcctcttttcaagctgtgtacagagtatccgacctttgtcgagctgatcgaccttgatactgagttcgtcaatcagctcatcctgggcttgttggatgaatccgaggatggtgttcacgaagagcgtgagttcgccgcagttcagcttgtcctccgcttccatgaatgctttgtagtaggcgttcttgttctccgcgatggtgcgggacagggatagcacggtgggcatagtcaggtcatggttcaggtacagggccaggagataccggccggttctgccgttgccgtcgtagaacgggtggacgtattcgaacaggaagtgcgacatgatggccgactgcagccggggaatctcgtcggaggtcgcgagatggatcatgtcggtgaggagcgcgccgatgttgccttcgcctttgactccgttatggatcgcgaggccgtgcggcccctgtatttccacatcgcctttccggaacaggtcgccgtccggctgattgctctcatcgatttcgtcgagcatgaccttgtcatagatgtcgcggatgtcggcgatgcctgtcggcaacgcggagtccttgtccgtgaggttcaggtacagcttggcaaattcgctgaaccgcgccttggagtcgtcgccgtcccgccttgccttgtcggccgcgtccacggcgtcctgggtttccttgcgggtgctgcgcacgccttccatctcgttggtggcgaacagttcctcactgatggaatgccgtatgtagtcccagcgcatgacgccgggaatcaggttccatagccgtgatatgcgcctttcggcgagaagtatattttccatgagcagggtcgtctcgcgcggcgtggcggagaacagttcgcccaatggcgtgatgaccccggtcctgaatgtggaatctgcctcaagccgctgccgtgcgagtgccgcatggttattgaaggaatcgactgacctgtcggcatggaacagccttgccaaacttctatacttcatatccatgagagactcacttcccaaagagcatccttgattatagaaagtataagatagagaaggaaatgagtcaataaacaactataaaatcatggataatacaaaaatatagttgtgcgcatgactgcatgtgagtgacatatggtagtgcccgaaatgcgtgtcagtagtgaaatacttcatgatctgttgttctttctgaatatgtgatggtatgcaatgggttttgccgcggtgcattgcgttgcgacgatgccaagaacgcatactcgtataggtacgtttatggggcatggtgcgaacgggtcggctcgatatcaccggcaatgattcagctatgcgtcaatgagaggtgtactggtcagatggcgtgttcgttcacgccgtcgctgctgaatgcgatgtgttgatcatggttcgcgcaccataaggtcttacgtccgaatccgtcaaatcacgcggtgtgtgaaatgcccgttgtatataaaaagtccggtgcaacgcacgatgataatgcgctgcaccggacctactgcagaaacaattgttacagactgtagatctgtgcgccgaacggccagagcgcaagcttggccattttgaacgactggatgccgaacggaatgccgatgatggtgatgcagttgagcacgcctgcacccagatagccgagtgccatccaccagccgaccagcaccacccagaggatattggccagcgtggagccaacgccgccaccgtattgcacggttttgccgaacggtgtcaaggtaaggcccgccattttgaacgcctgaactcctagtggaataccgataatggtgatgcacagaaacagtccgatcagtgcccagctgatggcgattgccagtccgcccagaatgatccacagaatattgccgatgaccctcatcgtaagttcctcacatttgccggcattgcgccggataccgaatcgaatgctggattccattctattaggcgaacacgggcgatatgtggggaatcggtgacgggacccctgagcatcccctgaatcgtccctgagccgcatgctcaggcgcctactcgggtgagcattctcacattcggctgatttctagcgaaaaacccttgtgcgggcgggctgtggactatagcatcacgacacatgaccactacaccgcagccttctcaggcatttcagtccactgccaccaaacccgccaccaaccgcgagctgcccctgccgcagtccgaccgagaccccgcgcacctgcagggccattggcttctggcccgcatcggtaagcacgtgctgcgccccggcggcaagaaactcaccgaacgcatgctcgccaacgcggacatcgccggcaaggatgtcgtcgaattcgccccgggactgggcctgaccactagggcgattctcgagcgcgaccccaagagctaccgtggcgtggaccgcgatccgcaggtcgtggacatcatctccaaactcaccagtgagaaggccacgattccggcaagctgcgtgcagcgcgacgccgccgacaccggtctggaatccaacagcgccgacgtggtgatcggcgaagccatgcttaccatgcagaccgagcgtggcaagcaggcgattatcggcgaggccttccgactactgcgcgccggcggcacctactcgattcacgaactcggcctgcagccggacaacctggacgaatccgtcaaggatgaggtgcgcaaggccctggctcgcagcatcaaggtgaacgcgcgcccgctcaccgagcaggaatggcgcgagctgctggaagccgaaggcttcgaggtgctgtggagaggcaaggagccgatggccttgctggacatgaagcgcaatatcgccgatgaaggtatcggcggtgtgctgcgcatcctgcgcaacgttctgggcaacaaggacatccgcgcccgcgtgctcaacatgaagcacaccttcgacaagtacagcaacgaacttaccggtatcgcgttcgtggtgcgcaagcccgaagcgtaacagcggtgtgccggcccacgatggccggataatgggaaacaagtaaaagcgatgacgcgtatgtgaggtacgcgcgacgaataggagaacatcatgaccgatgagaacgagcagcagaccgcatgcaaggcaggacgcgacgagcagcattgcaagtgcaagcagcgtagggaagccgccgcggcagccgaggcggctgccgccaacggcgaacaccactgcgcctgcaagcacgagcacgccgagggcgcggccgcggagccgggcgcgaagaaggagtgccactgcaagcatggcgaagtcgcggccgctgaagcgggtgaggccaagcactgcgcctgcaagcacgacgcccacgacgccgaaggccacgccatttcgaccgagccgcatcttggattcatcgaagacttggcctcgttgatcgatattcaggaggaggccactgtctcccgtacggtgctgcgcgaggacggcctgcgcgccgtgctgttcggcttcgacaaggaccaggcactgagcgagcacaccgcggccatgcccgtgatcatccaggtgctggaaggcaagctgcgcgtcggcggcgaaggccgtgaagtcgagcttacggccggcggcatcgtctacctgagcgcccgtctgccgcacaccgtctatgccgtcgaacccagcaagatgctgctgcagatgttcgacaaccgcggctgattcggtgaatgactggcaatcacgtatgagaagctgattgccgttagaccattcataatggcttccttcatatggtgttggtcgtatgaccgtaatatgaaggaagccatttcttagacgttggggagagcttgaattcgacgccatcatcatacggcctcaagggtgcataaacgatgtcacaagtagacgcacgcccgccagccatcccaaacgtcacagcaaacctagaacccgcatgagctgacggccgatattcgccatggctgcatcatcaaccacgccgacttggtatcccagcagtttgcggtcgacggtgacgatcttgtccgtcatcacgtaactcactttgttcaggccgttctccggacttggttccaatcggacccgcgtgtcgatgtcggaggaatcgtatgaggtcagcagacaagtgatgacggaatcgaaccgatcgacggcatcgctctgcacgatgacaaccggccgtggcttgctggcgtagccatcggcctgcaacgtccaaatctcacctcgtttcatcggacatcctcaaggcgagacgactggcatactcagtagcgtcccgctcggacgcaaacggctccacgtcatttcgtggcaaacgcacctcataggggaacccacggtaatcattgaacgcgctgatgaacatacgcagggcatcggccggggtggtacccagctgtcgggtcgtctccttaaacaacgcagcctgctcgtcatcaactcgcgtggcaatctgcatgctcacagccactccttattgctatttactatctttttgcaccaaattgtatcaaatacttgacttcagagtgaagcccccgcgttccaaggcccttgtctatactgtagacagttgttcttcatatgtgaatcgcccgatatgactttggagcgggcttgtgattggaggggccggatatgacgagttacgtgctgcggctctatgatgatccgctgctccggttcgatgcgtcgtatggcgagggcctgctggcgggcaagatcgaggcgcatgtccgctggttcgatgagtcgaagcgcgcgttgctgccgtttccgttggctccggagccggataatgcgaagctgacgacgtggctggagcggcgcacgattccgaagaatcgtgagttcgccacgcaggttcttgcgcaggcggggttgaacattgcggatacgctggggatcatcgacctgtgcaaggggctgtcggtcaacgattcgttctgggtggaacgcgacggtgagaacctcaagttcgcggacatcaacctgtatgacaatccgttggacgagacgctcgccatcgtggcctacacggggtatacgtcgagcgagaagcatgcgatcggcctgtcgagcgagtggacgacggacggccagttcccgaaggcgtggcggcatacggaacgtgggctggaactgtggaaggcgggttccgaagggtatgcgaacgccggtttggaaccgtattccgagtatctcgcctcgcagctggcgcgcaggctcggtgtgaacgcggtcgactaccgcatcgcccgttggaagggcaagctcgcgtcggtgtgcggttcgatgaactcgaaggacgtgtcgttcgtgccgttctatgcggcgacgcagctggcgtcgttcccggagatcctcgccgccgcacgcgccgtgtccgaggaatcgttcgaggtgatgcgcacgatgctagtgttcgacgcgctcatcgtcaatcaggaccgtcacgccaacaaccacgggttcctgcgcgacaaccgtaccggccggattctgggtccggcgccgttgttcgaccataacatgtcgctgttcaagaacgatatgcgcgccgactgggagggcggcgcgtggattccgcaggtactgtccgaacgtcagccggcaaattctcgtatgacgttccgcgaccagtgcgcggccatcatgggcagcgcgcagcatgagatgttgcgcaaagcgttggacgtcaccttggagaacgacccggcttacccgctggagccgggccgcatcgaggcgttgaacgactacctgcacgcggccgcacgatccctgctcgaactgccggtggtcgacgagtcgaagctgtccgaccagctcgatgcgttgcagccgtcaatcgagcacgctcctgtcatcctcaacgaacgactgttgcgataggccaaaccggtcgagttcgccaataaaaaggaccttccgggttgcgcactgtgaggaggcgtggaaggctgctattgacttgaatcctattatgcaaccgtgactgcgtgcctgttcatgttccagtccggttgtgtgatggacaagtgcggtatgaaggccgtttccgaatcaaagtccgattgcttcgctcatcggcgcataccatatctgggacgtctggcaggtccacacccgcctcgacgggtacggcaaagcacgccgatgtcgccgatcggcgagatcggcaatgacaggcggcgcatcaccaccccatggcatggcggctcggcatggcggctcggcaaggcgctcgacaccacgcccgagttctgggcgaaccttcaggccgaccacgatctgctgaccttcgaccccagcaccttggacgacatccgcccgctcgtggaggcctgacgccggggcgcttgatccaatgaccaccatcgtcgtatgtgcgattacagtggtcattttcatacctacggtacggggatgacgtgaacggccaacatcaccatgattgatggcggccgtttgcatatccacacatggctttgatgtctcagctgtccagagcgaaggtgatggaatcccgtcctagaaccgccgcgttacgtgcgcgactggcggcagcatcgcggtggccagggcgaacgtcaccgccaggaccgcgcccgccgggtggacgctgtacgcccagccgtatgcgatctgtccgaggggctgggcgcacatgctcgcggagagcgcgagcgacatcaccttgccggtcatgtcctcggggcagcccatctggatcgccggcacggcgatgaggttcgcgagggtgatggcgatcatggttccgcaggtgctcgccgtgagcaccgcgagtcgcatcactccacctgcgggaatcgtcatgacaagcgcttggggcaggatggtgagcgagaaggcggcgatcgccatcgggaatcgccgcatggacagcgacctcgcgacccgcccgccgacgagcgcgccgagcagtccggatgctcccacgagaccatatgcaaggccgtacgccgtggagccgaaccccagtacggtccgcaccatgtaggggaagccgacctccgcataccccgtcaccaggaagttgagcgcggcgcagatcaacaccagatgcagcacatgaggacgttcgcgggtgaggaaacgtccggccgcgcgcaggtcgtcgaccgcggtgacgcggccggcgtcgccgcggtcgggagcgccgagccggatgaaacactccacgacggcggccgcaccgaaccccacgatcgtgaggcccatcatgggcatcgcaccaaccgccgcgtacagcacgccgccgagcacggcgggaacgagcgtgctcgtctggttcactacgttcactacggccatcgcgcgacgcatcacatcctcgccatgggagcggaacatctgcggcagcgccgcctgcaccgtaggcgtctccatcgcgtcaagcacggcgagcaccacctgcatcacggctatcgccgccagattgaaaccggcggccgaaaagatcgccacgcagacgagcaccgtcacggcggaaagcgcgtcaagcgccaccatgacggtccgacggttcgtacgatccgccatcacgccgccaaggggcgagagcagaatcgtgggcaggatgctcgcagtaagaatggaggcgaacgccgccgccgagccggtcttgtcaagcacccacatggacatggcaaaccgcagcataaggttggcgaagagcgatattccgagacccgcgacgagcaggcggaagtcgcgtgtgcgaagaggatcagcggcttggcttctttgtggttgggtcgtgcattcgtatgcgttcgtcatcgtggattcctttcttgtgattggccacggccatttatacaaaccgaccgtcggtctgttatggtgataacaatacgcccaaggaaaagggcgcggaagcgcttcgacatctgtggcatcaggatgtgcaagatgcggcgcacccgggcgcatctcctatgcggacgccgtatcctcttccggcgtcagggccgtgagctcttcggtcgtccgcaggatgagcgtctcgtcgaacactggcgcgccgatggcgtcgagcatcgtggcgaggcagcggatgcggtgttccatgccggcatgatcggcggggtagaagcagggcatgagccagtagttgccgaggagcgagagcagttgcgccgcctcctcggggtatgccgtgggaatggagccgtcctgcacgcccatatcgatgagcgagcggaaggactccggcagtctcgtcgaccagaagcgcatgttcgccgtaaagaacgcaggatccttgagcagcgccagctgggaacggaccaggtctagatgatcgggggcgtccacagcggaaacgatgagcgcgcgcagcttctcaagcgcactcatgtccttgcgctcgatgagtttgtcgagaagacgcgcggttacggcccactcgtcggcgttcagccggtcgagaatcgcctccttcgatttgaagtggtggtagagcccgcccttggacagtcccaggtcgttcaggatgtcctggatggacgtcttctcgtagcccttttcagcgaagagcctgcgggcggaatcgaggattcgtcgttcggtgtctccggaatgtatatcgtgcgccatgcggatggcctgcctttcgttcatgtccccgtcaagcatacagaccgtcggtcggtctgtcaaatgatcgaggaagtcacccctgcgatgcgattgaatatccgcggcaaggcgggacgaagaagaccggtaagacgccgagttcaagttcaacgtctccaagtaagtgtttctctggctcccctcttcgaggggagctgtcgctacaagcgactgggggagcggtacggataaggcctgagaagtcgtcttctcaggcctttgtcatgacattgttctgcaaggactggctgctgcagcagcataatgtgtgttctattatgagtcttcgccagaaatcatgacggaaacacgagatgcaacccttagctcgcccctgattcatccccggaccgttattcaggcggagcgtatgcggtaagcccaatccttttgtgaagattttgtgtattgtcaggcatgcgtgggtttcaccgtcgatttgaatgatgataggcttctcgatgtctgccgtacgaagaccccatcaaggagatgccatgaacctgtatcgctacgcgatgttcatcgcacgcgcctgccgtgggtcgttcgtcggcaatgttctgtttgccaatccacgaatggccctattctcgatgctggtgtagcggggacacgccttatgccgggatgtaccgatggcccatccgcagtcgacgtcgcatgaatcgctcaccatagccatcaacttacgcaaagccgcgaatcgtttgccgtatatgaatgcggaacggatggcggcttttcctttacgtccggactcatcggtgtcctcgcgtcttgacacaagcatggggccggatcgccacacatgacgttaccaacagaaggaaatgctgtgacctcacagaaaaacgcggaattcgggtccgccgccagttccgtaaagcctattgatccgcacacccgattcatcgttgtgggcgtgatcgtcgtcggctcgttcatcgcgctgctcaaccagaccgtcatgtcaccggctttgccggcactgatgcgtgatttcaatatcgccaccggcaccgtgcagtgggtgaccagcgtctacatgctggtctcgggcatcatggtgccgatttcaggctatctgattgataaattctccacccgaaagctcttcgccggagctcttgccactttcatggtcggcacactgctgtgtgccgtcgcgccgaatttcatgctgttgctcgtcggacgcatactgcaatccgccggctccggcgtgctgttgccattggtcgccgtagtgccgatgctcgtctatccgccggataagcgcggcaccgccatgggcatggccggtatcgtcatggccgccggcccggctatcggcccggttgtcggtggtctggtgattgacagtttcggatggcgcccgatgttcattggcatcgcagtcgtggcactggtcatccttgtcggaggcacgatgatgctcaagaacgtcggcgagttgaagaacccaaagctcaacatcctgtccgtgatcctttcgaccatcgcgttcggtggcctgctctatggcttctcgtccgcttccacgatgggatgggccagtccggtcgtcattacctcaatcgtcgttggtcttgtggccttcgtcgcattcgtatacaagcaagtcaaactcgatgagccattgttgcgcgttgacacccttgccacccgcaacttccgcaactccgcgattctggtcactctgatcaacgccgcagtcgccgcaaccaacgtgacgttgcctattttcatccagaatgtgctcggccaatccgccaccgtcaccggcatggtcatgctgcccgccgcggcggtcggcatcatcatgagtccggtcgccggtgccgcattcgacaaattcggcccgcgcggcgtgggcatcggcggccttgcgctcatgaccatctctcttggtcttctcggcaccatcaacaccaggacatcagtgctgtttgtcgccgtgttctgcgcattgcaggcatccggtcaggctatcgccaacatgccgatcaacacttggggcgtcaacgctttgccgaacgacatgatcgcccatggaaacgccatcgccaacacaggccgccagatcgcggcagccattgcgacctcgcttctggtcaccgcagaaacatccgtgaccgcctcgcacatgtcccagggtgtgaagtccgccacggccagcggcatcgcgttctcctatctgctgtgcgccgccatctcgctggtcgccctgatcatctgcatcttcaccgtcaccagccgtgccaaggagaaggccgcacgcaacgccaaggcctacgaggcgcaagcctccgccgaagtcgcggccgaaaccactgaaggccagcccgccgagcatcactacgccggcgcatacgtggcccccgccgcctccctgttcaagcaggcccaggaacagtccatcggcgggatcatggacgatcagccctacagctgcctggacagcgatgacatcacgcatgtggtgcgcgagttcatccgcctcaacgtctccagccttcccgtggtgaacggcgatggcaggctcgtcggcttcgtcagtgacggcgatgtcatgaaatcgattgccacctatgaatcccgtacggtttccaccggcaccggttcgacgatggtggtgttcgacgacgaaaccgtggcctccaaggtgcaggcgctctccggcaagaaggtgatggacatcgccacgcgcaaggtcgttgccgccacgcccgaccagcatgtcggagaggtggcccgaatcctcgccaagaagcagttcaagaaactgccggtggtggatggtgatggcagactcgtcggtgtgatccgccgtaagtccgtgatggaacatgccttcgatgcgctgttcccaaaggatgatcggtgattaggcgccatcatcgctgaatagaatgaatggaatatgaggcttcccttctcgcgggggaagcctcattgctttgtccgcggagtcttacggcacctgcgcaagggcaacgtcacgtcttcatgatatactatcgaatagtgtgttcctatcgttgcatggtgacgctaacgcatggcgtcacgatactgaagcctgccatctaacggcgggtacggctcgttgctggagtcgtgcacgcatacgcgcgtcggcgtgcgtatgccgtgatgtgacctttgtagtggaattgaagaattgagaacactcgtatgtcttctagtagtacaacaactgaaccaactgtgcgcgaaacacccgaggtttccggcgatgacaatgcgaatgcgcgcgcagcggttcatagcgcgaacaaacccggtgccgcctatgccgcagcagtggccaacggggaatccgagcgtgcgtggatccgccgtgtagtgcttctactcaccggccaggcgttctcgctgctgggctccaatattgtgcaatatgccatctggtggtggatcgtattgcagactaaaaccggttcggccatgctgctggccacgttgtttggcgtggtgccgcaggccatcgtctcgattttcggcggctcctgggccgaccgtcacagtcgcaagttgctgattatgctgccggatatggtgattgctgtggtcaccgtcgtgctgtcgctgagcttcgccatgggatgggcgagtctgaccatgattttcgtggtgctgttcattcgttcggcgggcggcggtgtgcagacgcccgctgtgcagtcgttcataccggatgttgttccctcgggcaaactattgcgcgtcaactcaatatacggcgtgattaattcggtgaatatgattgtggcacctgcggtggctgctgtgcttatcaacacagtgccgctgtggtcgattctgttagtcgatgtgaccacggccattatcggcgtcggctttgtggcgttgatcaaagcgccgaagaagagcgcggaacatgttgcgaggcgtatggctgaagcggagaatagcgggcaacccgcactcgaaccgatgtcggatgccaatgctgatcgttcgctgattgtcagcgtccgtcgtgtgtttgctgacttgaaagatggcttcagctacacatggcgccgggcgaacctgcgcaacgtggtgctcggtggcgccttggtgtgcttcgtggccgtggcgccgatgaaccttacgctgttgctcatgacccgcgaatatgagggcatcgatttgaatctcggattcatcaacctgaccaccgcctccgataaactcgccgccaacgagctgggatggagcatcggtatgctgctcggcggcgcgctgatgtctaccatcggtgccaagctcatccgcaacaacatgcgcgtggtcgccttcggcatcgctctggtgggcgtctccgtcgttggtcttggcgtggttcacaatctgctggcgtatttgctgattgatgtggtgaacggtttggcttcggccatctgcatgggcccgatgcgcaccatcatccagaccgaggccgatgagaagatggtgggccgtgtattcggccttgacaccaccctgagcacgctcggaatgccgctcggcatgttgatcttcgcgccactggccgacgcgatcccgatttcgctggtgttcatcatcggcggtgttctgaccctgcccatcggcatctatctgttcggccaggcgcgccggcagtccgatatcgtggcacggcgcgcatagccgcacccgccccgcacatgcatgtcctcgttcgtaagattgcgcatactcgcgaatgagggcatgcggtacacgcaatgtgtatccccatgcgtgtccaaaacagtgttcatgtgaaattcactgcgtatttgcgctttcgccggcttaccgagattagccttagacaaggaataacagagtagaagcagaaggtatgcgcgtattcgatttcgacgggaccatctatgatggtgaaagcttgtttgacctgtacctgtattccgcccgccatgatccaaaggtgttccgctacattgcccctgtgctgcggtatgcgatcaaatacaagttgggcagggccacgcttgaacaaatggaatacggcgtgggcaagatgaccgaaggctatctcacggaactgagccgatccaaacgggtggcgagcgtcgaacagctcgtggacgatttctgggaccgatattacgcacgtatcaaaccttggtatcagcctgagtcggacgatgtgatcctcaccgcatccttcggtctgacggtgggggaggcctgccgcagactcggcgtgaggaatctcgtggccagcgaggtggacttggctacgatgaaggtcacgtacctcaacttcaacaccaacaagaccaaacggttccgcgaactgtacggtccggacgccgtcatcgacgagttctacaccgactccaaattcgatcagccgatgatcgacatggcccggcatgcgttcatggtcaaggggaacaccatcacgcaggtcaagtaggaaacaacagaaaacaacacaacgtaaccaataacgaaagaggaacacatatgagcatgccgctcgatctctacgtaatccggcatggcgaatccgaagcgaacgtcatcgtccaggcgggcgagcagggcgacaactccctgtacacgcaggacaacgtcaccgtgcccgaccgctcatggcggctcaccgccaccggtcgcaagcaggccgactgcatcggacgctggctcgtcagccagcagcagctgttcgaccgttacatggtctcgccgtatgtgcgcacccgcgagaccgcggccaccatggccttgcccaaagccaagtgggaggagaaccgtgtgctgcgcgaacgctcctggggcgagatcaacaccatcaccaaggacgagttcaaaaccaactacgcccgcaactggaacttcaagaacaccgacccgttgtactggcggccgccggcaggcgaatccatcgccgacgtggccgaggaccgcgtgcataacatcctgacctcgttgagccgcaaatccgactcggagtccgtggtcatggtcacgcacggcgacttcatgctcgccctgatgctcaccatcgaggatctggccgacgaggagttcctgcatcgcgccgattcggacgactggaagatcaccaactgcacgtgcctgcattacacgcgccgcgatccggaaaccggtcgcacgtccaagcgcgtgcgctgggagcagaccgcacgtcccgtgttggatgagaccaccggacgttgggaggtcaaggtggagccgtggcgcgaattcaaacgcccatatctgtccaatggcgatctggtggacgtggtgcaggccgtcgacccgcacctgctggagtattacggcaaatagcttgcgcaaagtgcatcttcgcaaaatctccatgagatataatggcgcgcagcgcggtcggatgtgtgtgtatgccgtgcctgacgccaagagcgaggagagtagtaatgtccaatatcttccaatggcaattgcatggcgacggcaagacgttgcagcccggcgaggtggtcgagcccgatgaacgtctgacttggacgcgtaccgccggcatcggcgcgcagcacgtcatcgccatgttcggcgccaccttcctggtgccgattctcacgggctttgatccgtccaccaccctgttcttcaccgccatgtccaccgcactgttcttgctcatcaacaagaacgtgctgccaagctatttgggctcgtccttcggcttcatcgccccgatcaccgcagttaccaccgccaacaagggcatcgcggtcgccagcttcggcatcatgtgcaccggtatcctgctggctttggtcggcgtgctcgtgcattacgccggtgccaagtggatcgacatcatcatgccgccggtggtcaacggtgcgatcgtggccattatcggcttcaatctggcgccctccgtatggaccaatttcaaggccgcgcctgataccgcagtcgtgactttgctggccgtgctgcttatcgccgtgctgttcaagggactgcttggtcgactcaatattctggtcggcgtgatcatcggctacgtttatgcctgcttccgcggccaggtcgacttctccgccattaatgacgccgcatggatcggcttcccgaagttccacctgccgcaggccgacttctccatcctgcctatgttcctgcccgtcgtgctcgtgcttgtggccgagaatgtcggccacgtcaagtccgtggcccagatgaccggccgtgactacgacaaccagatcggcaccgccctgatggccgacggtcttggcaccacgctcgccggcttcggcggcggctccggcaccactacctacggcgagaacatcggcgttatggccgccaccaaggtctactccaccgccgcctactggtgcgctgccgccttcgccctgattctgagcctgtgcccgaagttcggcgccgttatcaacacgattcccgccggcgtgctcggtggtgtgaccacactgctctacggcatgatcggcatgattggtattcgcatctgggtggagaacaaggtcaacttcgacaagccggtcaacatcatggtggccgctatcaccatgatcatcgccatcggccagttcgcgttcaccatcggcggcacgtccttcaacggcatcgccatcggtacgatcgtgattctcgtggcctaccacggcctcaaggctatcggcaaggccaccggcaccatcgccaaggacgatccggacgtgctgtaggtgcccgtttgaccgtcttatctttatcagcgacagaaattcaggaaaagagtggcttcgtcctgaatttctgtcgctgagtcatagtgagcgacagaattttaggaaatcacacccatgctcctgaatttctgtcactgagggtgtctcaatgacaggattttaggatgagtggggtcatttcctgatttcctgacgctaaagaacacatatgacgcgggctaaaaagtgattcatgaaacgttgaaagcaagatgtgcgagtaacgtcgtgaaatagcaagatccgtggtattcacaagcaaagtaggggccttacgctaggtttggaaagcttgcgtaatttgcgcaacctttgacatgaaaggccattgtgccccgtaacgattttgatgatttcgaggattccgccgatttcccgatgaatgacggcgaggaattcaaacccattacctttggtgaacttggcgtacccggactgttggtacgcgtgctcgcggcggacgggaaaaagaccgcgttccccattcaggccgatactttgcccgactcgttggccgggcgcgacgttctcggccgaggccgtaccggttccggcaagaccctcgccttttcgattcctctggtcactcgtcttggatcctatgattcgcttggccaaaccgcgatgaaggaattccgcgatgaaattaagcgtcgcaagaaggcaagtcttgaggagcgccgctccgatgatttcctgccccatccgcgcggactcgtgctggcccccacccgtgagctggccaaccagatcaatgacgtgctgatgccgttggcccatgcgtttgggatgaataccaccacgatttacggtggtgtcaagtacatccatcaggtgcgtgatttgaaggccggcgccgatatcgtggtcgcctgcccgggccgtcttgaggatttgctgcgtcagaaagcgctcacgctttcgtccgtcgaagtcgtggtaatcgacgaggccgacgaaatggccgacatgggcttcctgccgccggtcaagcgactgcttgagcagatttctcccaacgcccagcatatgctgttctccgccacgctcgatcatggcgtggatgaagtggtgaacacattcctgcatgatcccaaggtgcacgaggtcgattcggccaccgccgaacctgacctgatgacccaccatgtgtttgaaaccacgcgcggtgacaagcatgagcttgtacgtacgttggcctccggtactggccgtcgtatcctgtttacccgcaccaagttccaggccaagaagctcgccaagaacctgactcagaacggcattccggccgccgaactgcacggcaatttgagccagaaccagcgcgaccgcaatctcgctgccttcgactccggtgatgtgcgcgtcatggtggccaccgacgtggccgcccgtggtatcgacgtcggcggcgtggagcttgtggtgcaggtcgagccgccggccgacccgaagtcgttcgtgcaccgctccggtcgtaccgcccgcgctggcaaggccggcgacgtggtcaccctggtgctgccagaacagcgtcgtgaaacgcgccgactgctgaatcaggccggtatcaaaaccaagatgattgaggtcactcacgattcgcccgaagtgcttgagcttgtgggcgaccgagccgagcgcgtggacggctggagtctcgacaagtcgcagcccgtcggcaacccgcgcaagggcaagaataagggtgccaagaacgcggcgagcggcgagtccggccgcggcggcaagcgcaagcgtaaccgcaatcgcagctgtgacgagcagaacgtcatcgagaccgaaactcgctacgagaacgtcgacggcgagtcctacgatgatcagccgcagcacaagcacggcggcaaagctaacaagaaggccatgaagaagaaccgcaaccgtgcggaacgtcgcgccggcatgagcaatcccgaggccgagcgtcgcgattatctgttcgagcatggcgatgagcgtcgtggcaatcgacgcgaggatcgtgccgacactcgatatgaggatcgccgtgatcgccgtcgcggtaagaaatctgatgaccgttatgatgaccgtcgcggcgataagtactccaagaacggcaagtccaatcggcgagacagattcgattacgatcgaagcgatgagttcggctcgcgtaagcatgaaggcagcaagcgtatccaccgcaagaacgagaaccgcatcgtgcgtgatgagcgttccgagggagccaagcgtcacgagcgccgtatgatcgccaaatacggcaatacacaaggcccgaagcgtcaccattccaagaagaacagctcgccattccgctcgtccggtacccgcaacggacgtcgatgacgttccttggctcccttcagggagggggccaagcgctggttaatattggtacgctacggagccgtcggcgttgtggatggtgaaggtgggggattgctcgatgttgaggtccacggttagggagtgttgggcgtcggcgctcactgagcgatagacgaaatgcttgttttccagttcgagtgcctcggtacgcgcgtcaatcagccatggattgcggcggcgtaatgcaatcagcgcctgatgcaaccggtatattggctcacccaatgtggagagattggagggggagtcggggaacttcgggcgaatatcatcatcgccaccgaaccgctcctgcttgacgcccacatagccctgttcgtcgccgtaatagatgcttggcacgccgccgaccgtcatcagcactgccagtgccaacgccgccttggccgagcctatctgcgaggcgatgcgcgtcacatcatgattgccgatgaacgtttgtggcacgaaggaatccaggaacgcattgtgccgcttgaggttccaatccaactcaaagaagttctccgtctccagcgcatgctgaatcgacttccacagctcatactgcgtgactgaatccatcgtggattcctcgacgatgcgcgggtaatcgccatggatcacctcgccgaaaacccacgaatccggatgcgtggccttgacctgtggcaacactcgcgcccagaacgcgctcggcaccgcatacgcggcgtcaagtcgccaaccggcagccccgcgatccagccagtagttcatcacacgggccacatagtcaacggtcttatcggacgaatggtccagcgctaccagatcgtcgtgcccctcgaacacatccaaagtgggttcgccattatcgccgacatgcgtgcggaccagaccgtgccacgggttatcggccggatccaagcggccggcggcttcgtcaagcgacgcctgaacggcaggatgattgcggcttacatggttgaacacgccatccaatatcacttgcaaacccatatcccggcaggcagtgatcagccggtcggatgcagcatctcctcccagccgcacatcgatgtgcatatggtcaagcgtgtcatacccgtgcgtcgccgattcgaatatcggaccgagcagcagaccggaagcgcccaagtcacgggcatattccagccaaggaatcagcgcgtcaaggccacggccatggaattcgcgcgggccggcgggacggatatcggcgccgcagaatcccaacgggtacatgtgccagaacatcccgtacttcacccattcgtgtagctcgtgagccgaatctgcgcttaccgccaccgtgcacctcctgattgacgccgcgtccattttcgcacacgcatgaccgaatcctcggtagatgacgagcgttgtcgatgcaggcgccgaatcgaagcatacgactgtccctctctgttttcacgaaaggatgcgcggcgcgcaacataacaacaccatataatccgcgcgccacggaaactacgtagccattcttccgctacaatcagtgtgacggcttccgcccccgaagaagaaggtgttgatttccttggatgtctccctggcgaatttcattcagcaggtgttctcgaacccggctctgttcgtgacgacattgctgacgttgggggttatcttcgtcaacggctggaccgatgcgcccaatgctatcgccacttgtgtgaccacgcgatgcatgcgcgtgcgttccgccgtgatcatggcggccatctttaacttcctcggcgtcttcatcatgacgcagctcaatgcctccgtggcctccaccatcagcaatatggtcgatttcggaggtgatacgaatgcggcattgattgccctatgcgcggcactgttctccatcgtcgtatacagcgtgggagcctcgttgctgggtattccgacttcggaaagccacagtctgatcgccggcctgtccggtgcggccatcgccatccagggcggcattggcggcatcaacatgggtgaatgggtcaaggtgctgtacggtctggtggccagccttctgttcggattcgccatcggctggctggtgtgcaaggtcgtgacgctgatctgcgctggcatggaccgccgccgcaccaacggattctttacgtacgcgcagattgtgggcgcggccgccatgagcttcatgcacggcgcgcaggacggccagaaattcatcggcgtgctgtttcttggcatggcgttctgcaacggtcagcccagtgtggtgggcgtgatgatcccggtctggctgatgattctgtgcagcaccattatgggcgtgggtacgtccgtgggcggcgagcgcatcatcaaatccgtgggccaggacatggtcaaactcgagaaataccagggcttctccgccgacctgtcgagcgcactgtgtctgctcgttatgaccgtgctcggcattcccgtctccaccacgcacaccaagaccagcgccattatgggcgtgggcgcggtacgccgcatttccgccatcaacttcggcgtggtgcgcgacatgatgctcacctgggtgttcacgttccccggctgcggtcttatcagcttcgtaatggccaaactgttcatggtcgtgttctagaaaggaatcccctcatcatggcgagacaaaaagatgcgttctactttgacggattccgtcgcggtgcggactacgcatgtcaggccgcgaaactgttgtccgaagtgatgcacgatttcaatcccgatcagctgcgcgagcgcatggacagcatgcatgcgctcgaaaaggccgcagacggggttcgtcatgccatgatggacgagctggtgaccgccttcatcacgccgttcgaccgcgaggatatcgatgagctcggccgtgtgctcgatgacgtgaccgacagcattgaaggcgtgctcaaccgcatgtattacgacaatgtgaccgatatgcgtgatgacgccgtgcagatgtcggacatggtagtgcgtgccacggaaagcatccgcgaactggtagacgagctgccgcgattcaggcgttccaagacgctgcgcgaactggtgtttgccatcaacaacatcgagacggaggcagatcacctgttcattgaatcaatgcgcacgctgcacaccacctgcaccgatccgctgcaggtgttcgcctggcatgacgtgtaccgtcaccttgaacagtgctccgacgactgcgagcgcgtggccaacaccatcgacagcatcgtcatgaagaacagctgaccgaattaccggcactgcacgtagatttattggtgcgcgttcagccatatgatggcgagctgcgtgcggttggtcagtccaagcttgtccaatatcacgctgattcgattgcggacagtgccttcgctcaaaaacagtttggcggcgatgtcgcggttatcaagccccttggcaacgagcatggcgatttcacgttcgcggtcgttcagaagtttggtagcggaatcgttggcatttccggaattgctggaatctgcaggattcgtagtccattcggtgagtttgccgaggatttccgcaccgagcaccacctgaccggccatgaccgcctgcaatgcagggcccacggcggccacatcctgtttgatgaggtagcctttggcgccaagcgccatcgcctgagcaatgtaatccttatccgcaaacgtggtcaaaaacaggatgcgcgccgccggatccttgggcagaatctcacgcgcggcatccagcccatccttgccgggcatctgaatgtcgatgagcagaatatccgggtgattggccggtgaggcaaaatactgttgcacggcggcaccgccatcattcgccgtccacagcacgtcggccgtaccggtggcggtcagaatcgtctccaatgactggcagacgatcggatcatcatccacgattgcgatcctcattgttccctcgattctatggtccaacgctgcttcggcacggatacgaacacgcgccagccgccctcatatggcccgcaaaccgcagtgccgccaagggcacgcacgcgtgattcgatatccgccaaacccatgccgcgcatcagttcatcggtcgaaccacgcatgtcggcagcgccatcggcggcgagtcgtgagccgacacgcgtggcgcgcatcgtacgtggctgggttgcggtcgtctgggactcatcggacttgggcatagacggtcccggatcctgaatgaccaactgccagaacgcggggaagtcacgtaacgtcacactcgcctcatgcgccgcactatggtgcaccacgttcgacaatgcctctcgaatcacggtcgcgaagcagcgtgagaccgacgctggtgccttggcgatatcgttggccagcgtcacggcgaaaccgggggagatgccatcaaatgaggtaacggcatcattgatttgcgcggcgaaatcagtgccgtcatcctcaaggtcgtgcactgaccggcgtaccatcgtcatcgcatcatccaaggtcgtgcccaatgtggcgaaaccctgtgcggcgaccgtatcatttgtcgcctcggccactgttttgccggcctgcgcctgcatgattgcgcgggtcaacagatggcccacattgtcgtggatttcccgggcgatacgtgtgcgttcaccgagtattgccatacgaacggattgggcgcgttcctcatcgatatcggcaatgcgcaaacgattcgaacgagtggactctcgagccatatcctgcgctcgcagcagcgcgcaccgcgccacatccgacgagactcgggcccgtcccaggacgaatccgagcagtgcaaccagcgccatcgccagcgtttggaggtagtcggagccacgggtgaaccaaagcgtgagtagcggcaacacccatatccagcgtacggcggcagggagccatgggactgtgcgcacagcgtcggcaaacgaacgacgagaggccggggattgtgaggcactggggaagcggtcgcttgccgcggctcgggtttcgggtgaggcaacggctggcaaacgtgccatatcgtaggcgatgagcggcatgaacgcacaccatgacggcaccgtcacagcgatggcgagaaacgccgcgcacaatacccaagaccattgcgcagcggggcgcagccattccaccaatccggcgatggacacagccagcaacaggccggcgatgaagaagccatcgaaccgcgttccaacgagcaaagccagtgtcgggcctaacacgagcagcgagaccttttcggccaacacacgcatggcacctccctggcttgatgctcttccacccaccagtctagcggtgtgtggaacacaacgaacttgccaggcatgcgggattattcacgtaccggttccgcggtataggcttgcaggccgccgaaatccccaatctggtgttcgccggcacctcagtggcacaaggcaacggccgggcggtggtaattcacacaggcatgatcaccagattcgataaaatcgcgcgtctgacacagaatgtggaagacaatgttagttcattgcagcgcgaattcaaccatccgacccggcaaatcaccatcttcgccctatgcatcggtgtcgtgttcttcattctggacgtgctattcgtgcataatccattggccgaaacattcatcttcttcctcggcatggtggtggctttcatcctcgaagggctgctgcccaccgtgacccgggcgctcgccgtggccgtgcagcgcatgagcaaacgcaatgcactggtcaagaagctttccagcgtggaatccttgggtttcacctcggtggtctgcaccgacaaaaccggcacgctgacccgcaacgagatgactgtcgaatacttgtggaccctgaaccacgagtatcaggtaagcggcaccggatacgcgccgaaaggcgagatcacggtcgacggggctgtgcaccatgccgccgacgatgcggtattgcgcgagctggttactgggggagcgctctgctccaacgcgcacctacacgaatccaaaccggaccatgacgtgcgcgacgatcacatgccctccgccaacggccgttggcaagtgtatggcgatccgaccgaaatcgtgctgctggtgctcatcaccgaagtaccgattctgcagaccgtgttccacaccgcaccactgagttggggcgaatacctctacctctgctgcatcccgttcgtgattctcgccatcgaagagctccgcaaattcatctggcggcatcgtttcccgactgggttggtatagcgatatagcgaaattggcccccgccagagggggcagtattgacggaataatgacaaatgtcacgcccgcacggccgagttgtgacttttgtctgtggcggcgtccggccccttcttgggatgatggaatcaccaaggaagggagtggctatggcaaccgacaacagagcttccgaacacgactcgacaaccaacccggctctggccgtgcacgtcagccaactggtcaaacgctacggcgacatggtggcgctcgactactttgaccttgacgtgaaccagggcgagattttcggcctgcttgggccgaacgggtccggcaaaaccactgcgatcaactgcatcctcgcattgctcacctacgattcgggcacgattcgcgtattcggccagccgatgacgccgacctcatacgcgctgaagcgccgtatcggcatcgtgccgcagaacgtggccgtattcaacgaactgaccgtcaccgaaaacatcgactacttctgctcgctgtacgtgccgaagaaaactgaccgcgcgccgctggtcgaggagtccatcgaattcgtcggactccaggacttccgcaagttccggcccggcaaactgtccggcggtctgctgcgacgcctgaacatcgcctgcggcatcgcgcacaagcctgacctgatcttcttcgacgaacccacggtcgccgtcgacccgcaaagccgcaattcgattctggaaggcatccagcggctcaaccaggccggcgccacggtgatttacaccagccactacatggaggaggtcgagcagatctgcgaccgcatcctcatcatggaccacggccggcacctggcgctcggaaccgccgacgagctcaagaacatgatcgacacgggcgagcgcatcaccatcgaaacgctcgatctggcggattcggcgatggccgaggtccgtgcgctgccgtgcgtgatcgaagccacctacgacggcaaggaactcgacgtgcgatgccgtcgcggcgaacacaacctgaccgacgtgctcgacgcggtgaaacgctccggcgccaacatcggccacctgaccagtcgcccgcccaccctcaacgacgtgttcctggaactcaccggcaaggcgctaagggactaacaatcttgcccccgctagcggggctcccgcgaagcgagtgggggtggccttgcaacaaccaccctcagtcggcttcgccgacagctcccgtcagcgggagcaggtaaggagacatcatgtggaccacatttctggtcgcattgaaagcgaacttgcgcaaccggtcggcgttgttctggatgaccgtgttcccgatcgtgctggcgaccatgttcaacggactgttcggcgggctggccgaagcatatgaactcaagccggtgccgatggccgtcatcgaagacacccgttggcagcaggcggacggtgcccgcaccttcgtagacgcgctggccggggaaacggaatcggcctcagacgacacgacctacgccggaatcgaccaaaagctgctgaccatcaccacagtcggcaccgtgaaggaggccgaacaacggctcgccgacggcactgccaacggctatctgaccgccgacaataacggccgattggcgatgaccgtgagccgggaaaccgccgtcacagccaaagactccacgcaaaacagcggactggacattagcctcgcggccctgcgcggcgtcatcgacctgtacaaccgcaccgacgccgtcacccggcagaccatcgccgacaatccacaggccgcgctcagccggaacttctggaacagcgtcgggcagaacgtcgacatgacccatgagacgacgctcacgcatttccagcctgacgcgatcgcccgatactattacgcgctgctggccatgtcctgcatgatggccatgggatactccatcagcacagtcgccgccgcacaggcgaacctgtccgcgctgggcatacggcggaccgtagcgccgctgagccgggccaaacagctcgtcgcgggcttcctctcctgctggctgtgctcgtcggtcgccctgtccatcgcattggcctatatccggctcgcctgcaacgtctcgctcggcggacgcgaaccggcagcgattttcgcggtcatcatcgcctcgttcatgaccagctcagcaggcaccctgctcggcgcggtaccgaagttttcctacgacacgaaatacggtttgtcgagcggaatcgcctgcatattgtcgctgttcaccggactgtacggcggcttcgccatgcagatcagtgactggatagcacgcaacgcgcccatcctcggcaccatcaaccccgcgcaacaggtgacgaacctgttttacgacattttgtactacgacagctaccagccgttcatcaccacttgtgccattttgctggcgatgagcgcggtattcctcttggctggcatcgcaatgctgaggaggcaacgctatgaacacctgtaaagccacattgcgtgtactgttctcgcacagggcctacctgttgatttacctcgtgttcgtgggcatcatgatgctgtctatcagctggtcgatgctgtctggcacatccgattccgcagccgcggcattcgagccggccaaaatgcgtgtcgccgtcatcgatcgagactcggacaggggcggcatcgcgtcatcgatgcgcacatacctgtcggattccagcgaactggtgaacgttgacgatgctagtgaaactctgcaacaagccgtcgcctcgaactgggtggatctgatcgtcatcatccccgatggtttcgccgacgatttcattgatgccgcggcgacaggcgagaatccaccaagcgtggacacggtcaccagctatacgtccggcgcaggctcgatggcccggatgaacgtcatcgggttcctttcactcacgcgtacggcactgattggctcgcatacgacggtcgatagtgcggcgctcgcagctatggccggcatcgacattggagacactgcgggtgattcgtctgaagatggcatgggcgggtttggtgaattctcgaatcaggacatgcttgatatgctgccggccggtcagattgagaaacccagcgtcggcgatctgttcgaggcatcgaaagcggctgccgcatcggcgagtgacatggacgcgaaccataaggtcgctgtgatcgacacggcaagcgcggacgcggaaagtgcttcggacatggcggccagcggattcggcaacaccatgaaaaccgcgctgcatccgctgtttttggcgatgaccgtctgcggatcaatgattctgggcacattcaccaccggggaggttcgccgtcgtctcaccgcatccccgcaacgtatgtcgtcgatgggactccagcggttgctgacgttgggcggattcgcgctcgtcgtatgcgtcggctatctggtgctctcgatcggtctgatgatggcggcgggactcgatccgttgcacctgagcgtcgggggagtgctgatgacgttctgcgcaacctgcgtatatgcgctgatgactgtcgcctgtggattcatgctcagcgaattcgggttttcggaggcggctgccaacggattcgccaatatcttcggcctgctcatcatgttcacgtcgggcgtcgcattgccggttgacatgatgcccggcgtgatggtgaccatagccaagttcctgcccggctggtggtattgcaccgcgatcgacaacgcgctcggctccggcacggctgcggagagcggcgtgagcgtcgccggctgggccggctcgctgggattggtcgcactgttcggtgtgatgttcatctgcattggcctggccgccggccgcttccgccgatcccgtcccaccctggccgcgcccgccaccacgcagctggccgagtgagaaatcagcctttcaaccgataccgctgtaccgagtcgtcggcgaacttgactcgggcgacccgcccttccttcatcagctcgcgcataccggatgtggcggccagcggcgtcaactgcagttcgcgcatgatctccttgacgctcatcgccgaatgccgctccagtacggtcataatcgccttgaccacgtcgcccggcgaactgttctccatcgtgcgttgcttggtgatggtcatcgtgaacgtgttgatgtcgttgcgcgtggtcgccggctcgatgccggcctcgcgcaacgcggcggcgatgcgctggtagccgtcgccgccttctgggttcacaaacccgccgcccggatacggcgtggactccagcagcgtgaacaggaactggtttcgggtggagacgaacggcgcgcccgtcaccggatgcggactcgccagcacatcatgtgtcaccatgccgtacaggccacccggattggtgatctcgatgcgatcggtgaacacgctgatatgcacctgcgtgccgcgcgcatcgggcgaataatcacggtgggtgagcgcgttcgcaatcgcctcgcgcaacacgagtggcggataatcgggcttcttcgcgccaatccaacgcatcagcgagtcgaccgcatcgtcgatcatcaccggaatcgaaccgaccaccgacttcgaggcgaccaatcgttcgtcgccccggaacacatcgtcccggctcgtccccggaaacacggctatcgaaatgccgagccgcggatagaacttctgcggatagcggcccaacgccagcagtccggccaaggtggggcgcagtattccgccgacctccgactcgtcggaatcatcatggcgcaacacctgcagatccagcagcacgtcgatgccgtcccggtcggcgaacacgcgcggatgctgttcgcgcacgcgcgccaacaatccggaaacgagctgcgggtcgaggtcatcggtcgtggcgccgggcacgatatccagatcgtatgtgggctgcagatgctcctcgatgagccggtcgacctcataggaggtcatgcgccggtcgccgtcgccggtgcggatgaacgagccgccgtgcggtccgagcgcggtggtgaagcagggcttatcgcgcggcagcatttcgtcgatgcgcgcgaacaccagattcgcgccttcgaacgggcaggtgacgatcacgggccgcaccaccggcgtcatcttctcgcacgcctggctcagcgcctcctgcatggcgcgcgcgtcgaatccctcgaccggcgtgaacccgttcttttcggacaggccaaggatgatccagccgccggagccgttggagaacgcggacagcgtatcggtgatggtcgaggagatcttgcgcttgcattccttgacctcgcactgctgcgtatcgttgccgatcagacgcatgagttcgatcagctcagtcattttggcagtatagtcatcgaccatggcggcctccttgacaccattgtgccccataatccgccgcccgctcgcctccagccccgccggttcaccccaattcatccagaattcatgggccaaaccagacgaaacgaacgtcgatgtagggttcgattccgcgtgttcactgacgagatcggccggtcgaggcgggcggactatgttgggtggcgtggacggccagtcgaaaggcattatgccgctgcttgccgcgcgcgtcgccaagcgtaccggtcggccggtggcctggcgtacggtcggcaagctcggcgcgaccgcccggcgcgtgcgctaccggatgattggcgatatcaacgaccggccggacgtgctgatcgtgtgcgtgggcagcaacgacatgctcgccggatgttcggtgcgtgaaaatgggccgctgacatcaccccggtgctagacgcggccaagaacaaggccggcaaggtggtgcactcttttgctggtcactccatccaccactgccgcgaaaccatcggtgatgatcagcccgtcctcattgagcgactggtcagacctcttgccttggcagtgctgttctgtgatgtgcatagcgattttcgattccatggttgtcagaacgcttaaaggcgtctactggctcattatgatagcagcagtgacatgcggatatggggggcgctgtctaaatgaaagtgcaacaccctttagattggagattgtccagataaccagtgaaagggtgttgcactttcatttagacagcggggggacgattgagaagtcataattccgttacactagcaaggacgaggaattagggtatgcgcggattatcggtattgagcagggcgttgcgatgggcattggtgggtatgacgttttcgatgctgtccaacgcgattttcgaggggtcggtgattccttcgattctgatcgtcggactgccggcatgggtgatcgcgttccgcaagacgtttaatctggtcatcgacttcgcttctccgatatccgcatggatcgtgcagcggttcggctcgttccgttcgcttgcgaccacggagggcgtggaaggcgtactgtgcttggcggtcgcgctggtgcccaacggttggacgtattggaagtggctgctgctggccctgtcatgcctgctgctgatgaccgggcaggtcatcgacgtggcctccgaagtgttcgaggtggatgcggccggcgacgacgatgacatgctcgtcaagtacagcggctacgtcgccgtgattgccagcgtgggcggtacgttgctgggccaggttgccggatcggccttggccaacgcctccatcatggccatgctgctcacctcgtcggcactgtcatttgcctgcgcgctgacgcgattccgcacccgcgagttcatgccgggattcggcaacgatggtgcgggcggcgatgacggcgacggctccgccgacgaatccacggcggccgacacgtcacacgcgccgcagcgcactccggtcacccgcttgacccgggtcagactgctgatcgcatcgctgctgcttgcgctgattccgtcgctgtgggcaagctatgcgttgctgggcatcggctcccggtacggcagcgatatgctgaccgtggtctacgcattcggcggcgtgggcagcatcatcggatcgtttgtctacatgcggctctccgcaaaactcggcatgcacgccgtgtccgccatcggggcaatcgccacggcgatttcccttgccgccgtactggttcccgagtttgccgcggtgtgcgtcggatggctcatcaacaacctcggctatggcctgctggcgcatggcgtgatcgtatcgcgacaactgctgctgagcggtggtgacctggccaaattcagcggccgtgccaggttcgcgtatgcgatcggcggtgccgtcggcacgtggggcggttggctcggctccgcccactggcagatactcgccgtcgtggccctggtactgtgcgccggattcatcccgttgctcaaggccatgcctggcccggtacggcactgaggtgacggatggggccggctggcatctcgtgcgccgggcgtatttcggcagattttgccgtgctgatgtacgcaggtgttgacgttcggcgaggttcccagccacattgctgtgtgattgatgccgctcgataggcatatcaggccggacacaccacggcgatgccgaatgggcgacgggccgacgatccgcatcatcacagcaaccgggttctgccatccttgacgagcagggcctgccggttggtaagaggcttgagactgagatcggcaccataccggtcgagaatgcgttgtgcggcgtgacccatggccgctgcatgatggtgggggaccacgtggaaatcagccaggcccaatcctgtgtaatcggtgagatcgggggctttgtccgtgcggtccatgagcttgatgtagccgatgtcgagtgccgtgatgaccgagcctgcggactcgccgatatacggcgtgccggcgcgcacctgattgatgatggcccggtcggcaccggtgcggcgcaactcctgcaggagaaagaacgtgttgccgccgcccacatagatgcaatcagcctcggtgattttgtgggtgatgtcctcggcggagtcgctcggcatgttttccacatccagttgttcgacctcgaagccgagccgttgtagcgcgtgtttgctcaatgccgtacgagccggtccccacggttccacagcgctcgccgttggaatgaagacgacccgtttgccctgtggccgcggctcgatttcatgcacggtgggcgagacgttatggaacatcgaagtcagcagcatcgtaaccataatcgccttccttacacatcgactatgcggcagtgtaagtcctgaatatgtggaaacagctatgcgttcgctgcgggtatatccgaatcgatcagcgcgactcgaccagcgcgatgccggctgccgccatctgtttgcgggccgcgacaccgagctcctcgctgaccggtacggtcaggtcctcgaacacggtgacctcgaaaccgagcttcctggcatcgagcgcggtgtccttgacgcaatgcgattcggcgatgcccaccacatccacgcggctcacgccggccgtcttcagcgcgtcggctagtgtcttgccggcggcctgttcagccgagacctcctcacgggtctggatgcggtcagtattgtcctcgataccctcaaacccggaatatgccgccgaatactggcccttcttgaaatgatgctcgacgcccagcgccttgatcgccggatgcagttcggcgttcgacgtaccggccgcgccatgcttcggccatgtatccacgaaatctggctcagccgaccagtgagcgcctggctcgatatgccaatcctgcgtggtggcgatatacgcgtattcgccacgatgcgcattcacataatcggcaattcgttcggcgaccgcgttgccgccctcaacacccaattcgccgccctcgcaaaatgtcggctgcacatccaccgcaatcaacgccttgctcatagattccccatttcttttgaataggcctgtaatgtgcttttatcttagtggtttattgctgaataggggagtgccggattcgtcaaaagctagacgtttgattgcctgattagaccaatgtgacggtgatggtctgctcggcggtttcgtttcctgtccaaacaccgtctttgcgattccattccatgccgttcgcatgcaatgcgttgatgccgtattggcgtgcgtgcgtgaccagccagcccgtaacttgccagcacaggcgattgtggtcgtctgcggacaggccgtcgggcagagctacggtgattgtcgtaccgtttgatgaattattaccgtttccctcggcagttgcaggcgcagtagcggcggtaacactcggataggcaacaggaagcgcagcgataagcccatcggcatccgacgatgttgccggctccagcgcgcatgaaatagtcgctccgaattcaccggtcagtcccgcagcccaagcatgcgccatggcgtcccatgtggcgtacagatccgggtatcctgaacgctgcacttcctgggccgcgtcctcgatgggaatcgtctcccagtccggcacctgcatcagatggtcatagaagatgttcgtggcatacgtcatgtcggacacctgttccacggttccccaaccttggctcggccgctgttggaagagtccgatggaatccagatcgccataggaaaggttcgtgattcgcgattcctgcatggccgtggcgatggccaccgtcgccgcatgatccggcagtccgcgattgatggcgatgttggcgatgagctccgcgttctgggcctgttccggcatgagggaatagcttgggccgtcggctagtttcgccgaacaataggcgtcgtcggaggcgcgggaaggggtgccggaggaaaagaaaatgcgtggcagatagatgagcgcggccagaatcgcgacgatgacgcaagcgacgacaaacaccagcacccatctgccgcccgagcggcgacgagcccggtaccgcgttcgccgaaccatctcgcctccttcctggccttatcggtcttcgcctgattgcgcgtctatgtcatatcgtcacgtcaatctgatcaccaccagtcagagtgtcatatctgcctgatgaatgctcatagcaccgatgactttgccataattcttcacgccctttgactctcgcacaagccgaaccgagaaggatgttccaatgtccgcgtttcagcgtggccaagatcgataatctgggttgcaatcgtctatttccgcttcgaggggctgattcgccatttccagaacatctacttccgtttcaaggggcggatggttaagtagacagatcatgaaaacggcgggatggcgttgtcgttacgccgtttctacttttggtttgagcttcgaccagcccctcgaagtggaagtagatgttcccggataacagaatcagccccttgaaaccaagaatgccgttcgaaactgtttcggcggcgaaggaaccgtagacgctattgtgtgaaatacacccagtcccggtttgagagaggaacgtatggcacagccgcagccgtattacgccatcgaaggcaatgacaatggattgtccgtcgtgtttgtgcatggcatgggtgtggaccatcgttcgctgatgatgctcgatgaagcattcgacggcaatgattcgattcgccgcatatatctggacctgcccggctttgggcgtacgccggcactgcccgagaatgcctgtggactgccggaaatggctgattggctgcaaacggtcattgacggccttgtcggcaaagcaaccccattcgccatggtcggcaactcgatgggcggtgcgcttgtccgtgaagtattggcgcgcgaacctcgccgagtggtcggcatggcgctgatcgcgccggttgtggacccgcagcatgccggccggcatgtggccgaacacgtggttgcgaatcccaatcccaaactgacgcactccctgccgcaggaacaggtgttcgacttcatcaccatgggcgtcaaccagtcattcgatgcatggcggcgctaccagcggttcatcttgcctggtgtggcgttgtgtgaccgtgcggcgtgcgaacgactggatcaacgctattggctggatgacgaccccgaggaaacactcggcacatatgcaggtccggtgctcatcgtcaccggcaaacaagaccagatcgtcggatacgaagaccagcaagccctgttgccgcactatcccaacgccaccttcgtgacgctagacaatgccggtcacaacgcgcacatcgaccaacccgaagccgtcgtagctctcgtgcgcgaatgggtggcgcgcctgcatgtctgagcaactgctcatccgggcatctgagcataaaacttgtagctatctcctttgaaagaggtgcatcaggccttttgggaatgctatctgctgtcaaagaggtatctaagccttgagaactcgagcatgaccgttgcaattccaacgctcatactcgagttctcgcgtatcaggtacctctttgacagcagatagcattccgtaaatgggtgaatgtacctctctgaaagcagttagctatgtaaaaatcatgcggtggttatcggtcgctgtcctcccattcgagaatgtcgccgggctggcagtcgagggccttgcaaagcgcatccagcgtggtaaagcgaacggctttggcatgtccgttcttcagaatggacacattggcgggggtgatgccgatttgctcggcgagctcgccgaccccgatcttgcgcttggccatcatgacgtcgagattgatgcgaatcgtcatatcagatcacctgctcgagctcgctggactggtcggtggcggcgcgcagcaggcccttcatcacaatcatcagcagcatgaatccgatttcggcgagaaccgccacaccaagcaccaaggcgatggtgtagtaatccatggcctgcatggtcgcatcatgccagccggagataaggaaacacagggatacgagaacggtcagcacagtggcgatcgccgcgcagccaagcacccagttcacgcagggcatggccttggcggtgaacaccgtgccggagccggatagcgaaagaagccgccagacggccgcaaacgctatctcgacgcataccagaaacagtatgcccatgatgaggtatggccagcgcatcgccacctggctggagtacaggccggccatcacctcgctcagtatgggtgcggcgaatgcctggctccataggcaggccagccagaccagcacgatgatgaccttcaatccaagcaggacccacttgttcatgtaattcttcatgaaacgctcccttgaatcgactatttcgaataacgataattatatatcgaaaaacgatatgattggcagcgtggttttgtgaagattgcgatggcgcagcaatgcgagcgggaaagcccgtatgcttgttcgtccgctggattcccgcataacacatgtgcccgcaaaccgaaatggttgcgggcacatgcgaaaagatccgtcggtcgtcactcggcgtcgaccggtgcctccttgggcgcggagaggaaatgctcctcactgggcagcacggcattcaggatcacggccaccacgaacgccacggcgatgcagttcgaggcgaagatctgctggaacagggccgggaactgcgcgaagatgtcgcttacctgcgtgaagccgatgccgatggtcagcgagagcgccgcaatcgtgatgttgcgctgcgtgaagcccgcttcggcaatcatctggaagccggaaagaatgatattgccgaacatcatgatggtgcagccgccgagcaccgcctgcggcagcgagttgaacacctcggcgatggccggcacgaagctcgccaaaatcaggattacgccaccggaaagaatgaccttacgattgacgaccttggtcatggccacgagtccgatgttctgcgcgaaggaggtcagcggcaggcagccgaacaggccggagacggtggagataaggccgtcaccggcgatggcgccagcagtctcgcgttcggtcggcgtacggttcagacccactttggtcagcgcggcggtgtcacccagcacctcaacagaggagacgacatagagcaggccgatggagatgatcgaaccccagtcgaactcgggcttgaatggcatgatctgcggcacggacacaatggcaaggttctggaaaccggagaaatcgaccttgcccatgcagatggccaccacgtaaccgaccaccagaccgaatagcacggacagctgcttggccgtgcccttcatcaacagctggaatgccaagcaggcgaccaaagatataagcccgagcgtcagattctgccagttgccgaagtccttggcgccgctgccgccgccgaagctcgtggcgcccacgttgagcagggagaaaccaatggaggtgaccacgatggcggagacgattggcggcacgaaccgacgccaatatttggccgttaagcccagcacgagttccagcaggccgccgaccatcaccgcgccgaccaccgcgccataacccttgtccgcgcaaatcgccacggcggccgccacgtaggtgaaggagatgccggtgaccatcggtagccgggagccgatgagccacgcgccatacagttgcagacaggtaccgagacctgccaccagcagaccggcctgaatgattgtggccgactgggccggcgtcatcttcgcggcggatgcgacgatgaagatcggggcaaggttggccacaaacatggccatcacatgctgcaggccgaacggaatgcccttccagaaggatacgggcgcgtccagcgaggacaatgcctcaaatgatatggaattcttggttttcttctctgacatgattctctttctctctgttccctttttgtgtttgctcccgctggcgggagctggcggcgtagccgactgagggtggtctgcggtcaagatgaaccaccctcagtcactgtcgtgacagctcccgccagcgggagcgggcaatagtcctcagtgcctaaaggtgatctcgccggttccgggatccatggattcgacaatggccaacgaatctacgtcgtaaccatcggcgcgcagcgcgtcgccgccgccctggaagcccttctccacggcgataccaatgccctcgaccgtggcgccggccgccttgcacagatcaatcaggccgcgcagcgccttgccgttggccaggaaatcgtcgatcagcagcacatggtcgcccgcattcagatacttcttggacacgatcaccggaaattccttctgcttggtgaaggaatacacggtggtggtgtactggtcgccgtccagattgatggactgcgctttcttggcgaacaccaccggcacattgccgaaatgctgggcggccacgcatgcgatgccaatgccggacgcttcgatggtcagaattttggtgatgtgcttgccggcgaaatgcttggcccacgcggctcccatacggtcgaacagacgtacgtcgcactggtggttcaggaacgcgtccaccttgagcacgtcacctgcctttaccgttccctcgctctggattcgttcctcaagttcctgcatcggacctcctgtcatcgtgtgccacaaccgatatggatgatatggatatctgaaagtgtacgttgtccgatgcgagagcggcatgtcggcggttcttcgccgagtgataccgtcggccgtcggaacgtcattcgcttgtaacggaaccgtccgccggccgcccagccccgggccggttcgtcacaccgacgctgacccgtgcatgtggtaaacatgaatgtcgcgattcaaagggaggcaacagtgtacgacgagccggaagtcatcgcccgcagcgcgcaggaactcgtaggcgacctgaacccgcagcaggccgaagccgtgcaataccgcggccaggcgctgctgatcggagccggtgccggttccggcaaaacccgagtcctcacccgacgcatcgcatggatcctgagccagttcggcgcatggcccagccagatcctggccatcaccttcaccaacaaggccgccgccgagatgcgcgaacgactcggctcgctgattggcccggtggcccagcgtatgtgggtctccaccttccactccgcctgcgtgcgcatcctgcgccgcgacggcaaatccatcggcctcaaatccggcttctccatctacgattccgccgactccgagcgactcgtcaaaatcatcgccaccgaattcaacctcgatatcaagcgctacaccccgcgttcgatcctcggccacatctccgacctgaaaaacaacctgaccggctggaaggaaaacctcgccgtccatgcgcccgacttcacacccggccagcgcggctaccagttcggcacggtgggcgaccttgaagccatctacgcggtgatatacgccgaatacgagcacaggctcgctctggccaacgccgtcgacttcgatgatctgattgggcgcacggtcgaactgctgcgcaccgacccggccgtcgccgagtactaccatcaccgtttccgttacattttggtcgacgagtatcaggacaccaaccacgcccagtatgtgctcgtacgcgagctggccggtgtggacacaggggagaaggccattccgggcgcgccgaacgccggcaagacgggccctgcttggatcaccgtcgtgggcgattctgaccagtccatctatgccttccgcggcgccgacatccgcaacatccaggatttcgaacaggacttcccgaacgccaagaccatcatgctcgaacagaactatcgttcgacgcagaccattttggacgcggccaacgcggtgatcagcaacaacgagggacgcaagcccaagaaactgtggacagcactcggcaaaggcgagccaatcgtcggctacgcggcggataacgcccagcaggaggctcagtgggtggccaccgaaatcgcccgactgcacgccgaagaagatatcgcctactctgacatggcgattatgtatcgcgccaacgcgcagtcccgctcgctcgaagaggcgttaatcaacgcagggctgccgtaccagctcgtcggcggcaccaagttctacgaacgccgtgaaatcaaggacgcgctggcctacctgcaggcgctggtcaacccggatgatgacgtgaacctgcgtcgaattttgaacgtgcccaagcgcgggctcggcgatcgtgccgagggcatcctgctcgcctatgcgcgcgaacgtggcaccagcttcttctatgcactcatgcatttggatgaaattcaggacgtgcccacacgtaccgccacgcagctcaaggccttccgtgatttgatgggtgagctctcgcaattcacgcgagcacatgacgccaagcccagcgagattgtggccgaagtgctggagaagtccggcttgcgtgcggagctggaaaagtccgtggacccgcaggacgcctcccgtttggaaaacctctcccagctgcagtccaccgcagccgagtttgagcagaacacgcccgacgccacgctatccgcattcctggagaccaccgcgctcgtggccgattccgaccagctgcccggcgaggcggaggattccggcaaagtgacgctgatgaccttgcacacggccaagggcctcgaatacccggtggtattcctgaccggtatggaacagggtacgttcccacactcgcgctcgatggaagacaccacagaactgcaggaagaacgccgacttgcctatgtgggtattacccgcgccaagcagcggctgtacgtcacgcgcgcggctgtacgctcccagtggggtcaggccgccgatatgatgcccagccagttccttgacgagattccggattcgctgatcgactggaagcgtcgtgaggccggcgtggaacgcatgcgcgccaactgggaatccgatggattcgccgacgattacggcggctgggatgatgacgattttggcggtacgacgttcggtgggtcctcgacattcggctctcgcggttcgggttcgtcgtatggctcgagatctcattacggctcgtcaagctatgggtctggctcgtcctatggctcccgttcgggcggttcatcgtatggctcacgttccggctcctcctacggttcccgctcgcgctcgggttcgtcctatggttcgggttccggctcttcatatggttctcgttcccgttccagttcggcgtccggcggcactcgtggcggcaaggtcactacgcgccacaccacgccgaagtccggttccgccggatcttccatgccaagttccaagctcgctaaagataatggactgaatatctctgactttgccgtgggcgacatgatcagccacgaccagtacggtctcggcaaggtcaccgacgcgcaggacaagggccgcaattcggtcatcaccgtggacttcggctccgccggcgtcaaacgccttatgctccgcgtggcaccgatcgaaaagctgtgagctgaaagcgcataccagataatttcataaaaaacaagacttgtgttcctcatcacactgtggccataatgcggaggttgtgcccacgaacccttggtagcaggggagaggaaggaagttatgaagaacaagctgttcgcatccgtgcccaatattctgttcggtgcgcttattgccatcgcaccccagacctttgctcacgcttgcaccggccatgacatgccgggtgcctgccattactcgcagcaggccgccaccggtatcggcgttgtgattctggtgctcggcgtcgtggccttgttcgtcaacgcccaggtccgtattggtctgaacatcgccgccatcgctaacgcgttgctgctgcttgctgtgcccaccttcctgatcggcatctgcaagggcgccatgatgcactgccgcatggtcatgctgcccacgcttatcgtgctcggcgtgctcactctcgtgttcgccgctgtcgccatctggctcgattcccgagcggccaagcactgaacttgacctcgtgtgaccggggtccgatttcattccaggagtcgggttccggtctcgcttattgcaaccgcaccataattgataaggacccccatcgtgccatcgcatatcgcattgcgcggcctgccgtttgaaaatctcaagcgcaagccattccgcaccggcgccctgctcgccgtcgtcaccattcttgcgctgacattcttcggcggcaccatgctgaccatgaacctcaacaccggtatgaccagcatggagaagcgcctcggcgccgacctgatggttgtgcctcaggacaccgcgcagaaagccgaagcgctgttgaccaacggcaaccccagcacgttctatttcaccagagacatcgccactgaggtcaagcaagcggatggcatcgaacaagccagcgaacaaacctacatatcgtcactggccgccgcctgctgcgacgaaaaactgcagatcatcggctacgacccgtccaccgacttcgttatcgagccatgggttgcgtcccaattcaaaggcaccctcgaagacggcaagatgatcgccggcgcgaacgtgaatgtgtcgaccgatggcaccattgagctatacggccgtaaatggccggtggtcgctcagctggccaataccggcaccagcctcgacaattcggtgttcatcaaccaggccactgtgcccgacatggtcgccgcatcgtccaaggtctccaagcaggtcatgcccatggaatatgcgggcaaggccgtctccaccgtgatgatcaaggtcaagcaggggtatgaggcgcaaaccgtggccgagaacatcaaacgcattgactcccgattcgccgatctgggctacgtgtatcccggcggcatcaccgccaataccaagacctcgctgaccgcattggtcacctacctcaaggtgttcgtggccgtgatctgggtgatgggtgtgatcgtgctgctcgccgtattcgcctcttcggcgaacgaacgcaagcgcgagttcgcgtccctgcgcattatgggagccacgcgtggcatgttgaacgtcatcattctcaaggaatcggccattatcggactgattggcggcgtaatcggcgtaggcgtggcgagcctcgtgatcttcccattcagctcgctgatcggcaaacaattgcaattgccatatctgcaagccggaccggcctccgttatcggattcattgccataactattgtgtgctcaaccgccatcggcattgtcggctcgttgctgaccatgtggcgacttggccgccccgaagcctatctgaccctgcgagaaggggagtgacatgaccgaaactgcatctcatctgctggaattggtggatttgacccgccagttcgtccgtcgcggcacgccgtttgacgcggtcagtcacgtcgatctcacgattgacgctggggaattcgtcgccatcgtcggtcgctcaggtaacggtaaaagcaccctgattaatatggtcgccggattggtgcgcccaagttcgggaaccgtgcatgtggatgggcgcgaagtgactgagctgagcgataaggaactgtccctactgcgcaaccgaaccatcggtttcgtgacccaaagccagaccctgctcggcaatctcacggtgctcgacaatgtgattctgcccgcgacgatgttcccggatgctctgccgttcatggaggctgagaataaggacgatgcagccgtgcaaaaacagaacaatatggccgagaccgagccttgcatcgaatctgaggccgataacggttccgcatccgatgagaacagtaccgagtcttccaccgagccggatccgtttatgccggatgtcatcgcgccgattgcagatgctgacggtaaaccgtcaaactcagctgcaagccagcccgacttatttaccgagcgcgccaagcatctgctcacccagctcggtgccgccgatttggcagacagctatccgcgcgaactatccggtggtgagatgcggcgtgtctccatcgcccgcgccctgatgaatcagcccaaattgcttatcgcggacgaaccgaccggcgatctcgaccaagagagcactgacatcgtgatgcaactgctgagaagccaagccgataacggtacggcgatcctcatggtcacgcatgatccggatgcgctggagtatgcggacaaggtataccgcatggatgccggagtgctgtccatggctgcggtgtaatattgttcgctggtgtctgccgactggtagatgccgtctggagtcatagcccgtcaacgggtcggcggtaggcgatcgcaagaacgccaacccgctcgtgagcaatcacgacgaagcgttggagaggcccgactcagcgtttggaatcatacgaaaccaaacgttccgttcagataacgacagaaggaataatccaatgacgaacgttcagcgttctcgccgtcaggtgcgcctgtcccgcgccctcggcatcgcactgacccccaaggctcagcgcattttcgaaaagcgtccgtacgctcctggcgagcacggccgcgaccgtcgccgcaccgaatccgattacgcggtgcgtatgcgcgagaagcagcgtctgcgcgctcagtacggcatctccgagaagcagctccgcgccgcttacgagaaggctacccgtaccgccggccagaccggtaacgccatgctgaccgacctcgagacccgtctcgacaacctggttctgcgtgccggcatcgcccgcaccaccgcccaggcccgtcagttcgtggtgcaccgtcacatcctcgttgacggcaacgtggtggaccgtccgtcctaccgcgtcaagcccggccagaccatccaggtgaaggccaagagccagaccatggttccgttccagatcgccgccgaaggcgtgcaccgtgatgtgctgcccgcggttcccggttacctcgacgtgaaccttgcctccctgaaggccaccctgacccgcaagcccgaggtcgaagagattccggtgcaggtcaacatccagtacgtggtcgaattctacgcccgctgattagggcccccttatctgaaacatcagaatcaaggacataccgcttggaccccgctcccgcaagggacgcggggttctcgcgttccggagggcgggcgttttcccggagactgaatgaacggaatcaggccgttctgcgcaggaggaatggggcggactttgggcttgagctgcggcgctgggcgctcatgcagtcttgtcatctgcattgtgggtgatctggatgttgttgttgcgatgagtccgttcggcacattgatcgaatatcttctggtctacggatgcgggcaagccatttcttggaaggcgtttcgtcgagattggcgggagcttgcgtcagcaggcgtcgatgaaggtgctgaggatgcgacgttggttgctatcggcgcggtgggagaactcaggatgccattggacggcccagacgaaacgcttggccggcatccagaccgcctccacgatgccgtccggcgcggtggccatcggttccagtccctggcccagcgtgcgaatcgcctgatggtgatagctgttgacgcccagcgtataggcgcgcggatgatacggcctgccgaaggaatcgacctcatcggcctccgcctcactcgggccgttgtctcccagcggccacaacgcacgggccaacggcgaatcgggcgcgatcgacacttcgtggaccaccgggtcatacggcggcttgtcgccatgatgcacgaccgggctgggatgctcgtccggcagatcctgccacagcgtgcctcccaaggcgacgttgaggctctggatgccgcggcagatgcccagcagcggcttgtccgccgcgatgacagagggaatcagacgctcctccatccggtcgcgggccttgcatagtttgaccgtcttggggccggccgcctcgccataccgttccggatccacgtcgtggccgccggtgaccaggaatccgtcgcattggccgaccaactgtccgattatggtctcgtcgtcggtcagcggcagcatcaccgggatgccaccagcttcggcgatgccgtcgaaatagccgggcagcatccacaggctgttcagtgtgtcgtcccacaacgggaccacgccgataagcggacggtgggccatcgctacctccaaacgtgtacttactgataaagcgactcaacttgctacagtctcgaacctgaaaaattgtaccagtgtgacttgtgggcggagtctactgcatagcttaggggggggggtagggatttcaatcaagggcggcttatcgctcgtagtgttccaattcggctggtgggtacacctgggtccaatggtgcggctgcaggtcgcgcagcggcacgaacaacggatgctctccctgattgttgtcggacacggcgcacatcacgtcgtcgccccaatagcgcagccgttcctgacagatgccgcatggagacaacacggtgaacggggcgtgttcgtcatcgcgtacgacgcagatggtgtgggtgacacggcgatcaagcttcatcgcctcgcacatcgctccgacctcgatgcatagcgaagcggcggcattgggtgtctcaatcgccacgctcgtgacgataagtgcatccgagccgttgcttccgtcatgtttaccgttgtctttgccggcgagtcgcatcgccgccgcgcctccccatcctgtcggataccttcgctcgatcagttccacggcactgcgatacagcgtttcctcgatatgacgctccactggagccatatggtcacctcgcgtaatcgacctgccatcggtgggcaggcgggattcaaaccattactagtctaggggggggggagatatccttgacgcatgcttatcgtcgaagtagttgtggccgtggtcgtcggcgtgtttttggtcggggtctatcgtgatgcaaagaacggaacgttgcctttgcagaattcggtaggcatcaaaacgccggcaacaatgtcatccgaagacacatggaatcggattcacaagcagtacgctccgatattcctcgttgatgcatgtgccctgttcctcatcgcccttgaaatcatcattggcggggccatggagaagaacttcaataacatggcatcggaggcattgattgcgttggtggccacgcttgttgtcatggtgctggccaatctggtcgtcgttgttgtggcagatcggtctgcacgaaaatgagatagcttggtgagaagccgctatgtcggacttgctgaaacaaccaacttcgcaacggggtaaaaagtaagagagcgacgaatcgggattctcggaggtgttatatgttggatattcaagatgatatcagtagctaccttgccttttcgcactatatcgattggaatgaaccgagtgtgcaaagaaaagccaaggaactaaaagactccactgaaggcgaaatcgaactggcaaaagccgcctactattttgttagagatgaaatcaagcattcatgggatgtccaagacaaaagagtcacggcaacagcctcagacgcattaagggagggcgtcggtatttgttgggcaaaatctaatttattggccgccctattaagggcaaatggcattcctgccggaatatgctatcaaaggcttacgttaggcagtacgcctgaaagcggatactgcatccatgccttgaatgccatttatctgggatccattgaccgatggattcgtgtagatgcaagagggaataaagagggtgtacaagcagacttttctgttgacgatgaacgtttggctttccccattcggaaagagtacgatgaggtggattataaaactgtgtatgccgaaccgttgccgcagacaatgagcattcttgaaaatagtacagatgctctatacatgtatctgcattcgctgcccgaaagaatttgacgaattcatttttatcgggaggcaggaggcagcggctggttcggactgcattagcggttagcggggaacgattcgcccgcgacaacagcccatcacgccaaacttgacaagagtgacgtcggtgacccgtgctgcggcaagcacctcgacagggatggtgacggtatcggttgctctcaggctagtaggcccggatagagttcgttgatcgcccaggtgacgcggccggcatcatatgccgaaagtcttcctgtcgggccgtcgtcgaggaaaagattgcttggcagccgcagcagttgcgagcatcgcacggcgctgggcttgctcagtcccgcgtcctgccagtcacgcagcaccacatagcccggttcgtcgcgccaggtgttgccggtgaccttggtcaccaaggcgatgcgggtgccgtcgtcccattggaggatcacgctgggacggttcttcgctttgcctggcttgtcgggaaaagcgaacggcacccaccatatctcgaactggtgcggatcagtcttcatcatcgtcccaaccctccggcaggatcacggcaccatcacgtatctggggcgtcacgatgcggggatcatccatgttcgctttgaacaggggatatccctcgttgtctttttcgaatgaagggcggacgcttggcatgaatggcagacgcccgtcgcgtaccaattgtctgagagacatttcggcaaacgtgctcaggttcaaccccatggcgtcaagtatggcgatgccgtcacgcttggtctgcgcatccagactgatcgtggtcttctccttgatagccatcattactccttataacagtggtatgacatacgtatatcatacctcaaatcagtcatgtcagctggggccccgttggctaaatgaaagtgcaacacccgttagattggagattgtccggataaccagtccgaagggatgttgcacctatgggagaagtatattcgcacctgtcggaagaggaacgccgggtcatccggatcgagatcggcaacggcatcagcatccgcaggatcggtctgatgctcggtcgcaacgtctcgacggtcggcagggagatcgaacgcgacacgtggttcccgtccaacgagaacgagtcctgacggccgtaccggccgaaacggctgaagacgggcccgtggacgggcggatactacatcgccggccccgcccggcgcaaggccggccgcaggcgcgccgaaccgcgcaagcgctaccgcctgtcatgcgaacgcctgtgggcgcgggtggccgatcatcggcggcgggctgcgcgtcctgttccccgacggctccgccatgcgcgtgtgcccgcagaccgtctaccgttggatctacgccgaccgccattgccgtgaacgctgggcgcgctgccttccacgcggccacgggaggcggcgcaggcgtggcggcgggaggacgtcgcgtttcccgattcccggacggtctcccatctccgagcgtccgccggaggccggcgaccgcagcggtttcggccattgggaggccgacagcgtgatcggcgccggacgcaacctgcacaccgaggtcgagaggaagaccaggttcctcatggccgggatcgtgcccggcaagaccgccggggaaagcgtcggggcgcagctggcgatgtcctccccgctgccggccggcgcgcgcgtcggcgtcacgcacgacaacggcaccgggttcgcccgccacacgcgcctgcgcgacgagctgggcatggacacgtacttcgccgacccgtactccagctggcagcggggaagcaacgagaacgggaacggcatcatccgccggtatctgcccaaacgcagcgagatccggatggacatggccgggggactgcgggagatcgtcgacgaggccgacaaccgtcccatgcgcgtgctgggctaccggacgcccgccgaggcattcgccgacgaactgctagaattgcaggaccaacaggggtgttgcacctctaaatagacatcgggggcctcggacgcatagaccccgcgtgataagctgcgatagtcctagacaaagggacattgcatcgcagtcgcccgccaccgttcacggtcggcgggcgactgtcgtttaaggtcactctttgtgacccatctgctcgacggcatcgagatatgcgcggatcgcctcatgcgtgccgtattcgcgaagcagacattcgtatgcgttgttatgcctatcgtcgccatcggaaagccggggcctggccatgagctggttgaggatctcctgcaacagttccttcagaaaggcgtcgatttcgtcgtcttgtcctgtctccgagagcatccagcgcagccggtccacgtagcgcgcgtcctcggcaagcttgccccgggcgatgtagatggcatagagccgtgccagcttctcgaagtcatgggatttctcgtacatggcctccagcagagtgaactatccgtggggcaggtccgcggtcaggtccggcgccttggggtcgggccaatggtccgtgtccatgtcgatttcctcttcgacggagggaatgcagttgccgagtatttctccgaaatgcgtgccgtccagccaacgctggtacctgtactcttcagccaagccgatgaggtgctccaatccgagtgctgtctcccgcgcggcatcctcgccatacacccacgcgcccaatcgcctggcgccacaacggtcgaccatttccgacacctcgcacgggatgacgattttgccattgagcttcgatgaataccggttgcggtagaacaggcggaagcacacggcgcacgcatgcacgcaacgcggtgcctcgccctgtgcacacgtgcaaccgatgccggtgatcgtccgttcctgcatcctgacggccacggatgcgaccagattgtcgccatcgaccacgtccgcatgacacgtgttgcccatctcatgccagttgcgtaggccgccgcgctcgtacaagcccctgccttggcggagcagccgagtctgggccgccacacgttcctggatctccgactccgggccgtcgaactggaacagcaggctgaactcattcaccttcgtgactggaactgcaaatggcttctcgccattatcccgacctggatgccacatgaccatgcgttctatcatcccctaagaagccaaagggctcgcctatggcggctctttccatgcagcagtccgaatggcggataagttgttcgcacgaatcatgatcccatctacaggactgagaacataagaaagcttcctttcgttaggtaccggaaggaagctaaacatcagaggggcatactctgtattgcacaggaaacggttgtggcaccgcccttgggcagtgccacaaccatcattcgggattcgcgaagtcacatcatgccgggaacacaatctgcgagttgacgcaggtgatgaccatggccaggattgcgttgacgatgccgccgagatacgggttgcgggtcttcgcgtagatgcctcgcgccgtcagcggagtgacgaacaaaaggaagatcgtcaggaacaggttgtcgacgatgcgcgtgtaagcggcgccgaacatgtcgttgacacccgtgaccatgaaccacgtccagccggcgccggacaccagtgcaggcacggcggcggtcacggcggcgaggaccaggatgttgacgatcttgttccggccgtacgacgtgttgtagttcatgcagttcacgaagatcgacgagatcacatagccgatcaggaagatcggcaggaccttgagcatctcgacgatcttgtaggccgggaacgggacgatgcaccagtacaggaacgcaaagttcgtcttgaagaagtactgcgcgccccacaccagcagcagggttccgccggtgacagtcaacgccagcacgatcgtcttgaacaggtcgaagaccgtggtcttgatgtcgatctcatcaagatccatgccgttcttcttggcgaagcagtgataccagacgaacgtcaccagaccggtgaacacggacgaaatggcaagcatcgcggcggagaacaacggctgtccctggcggaagaacgagccgatgtgcgtgtcgacgcccagatagtagagcgacagagtgctgacggtcgcgaacagagtcgtgacgatgaggcagccccaagcccagcgtttgctgcccggatgggctgcggcgactcgcatgacggcttcgccgcgggacgtgccgcggaacaacggcatgcgggagagccacagggcaaagaacacgacgaacaggaacatgccgaggaagccgatcgtgcttccgatcatgcgcagcgggtagatgcggttggtgctcttgagcgtggtgtccacgttgagcgcgcgggtcatgaactcgactgcgttcgtggtggacctgggctggaacagctgcgaagtgtggaagccattctccatgtagatgacgcgggccgcttccttgccgtcgatggtcttcgtataccatttgccgctcacaccgtccggcgtggaggcatcgggcgtgatgccgaagttgaggaacgacttggcgttgttgtgcttgagataatcggggttaggcagcatcttgccggtcgtcttgtcggtttccttgaaggaatactggtcgaacttgccggcgatgatgccgacgtcacggttcccgtaatagttgaagtattcgccattgttcttggacgcggcctgcgcggacgtggtcttgccgggcacatagccgaacgcctgggtttcgttgtccttgtagacggcgtcacgactgacgtacaggattgccttgatcaacggagtcttggcctcgttgtcaaggaggatggtctcatggatggtgttaccgccgcgggattggccggacacgccgatcttgtccttgtcgacgaacggaagcgtggtcgcatacttgacggtgtcgtacaggccgcgcccgttgacaagccagtcggtgttgttgaggatctccgagtcacccatgccgtacaggtcgaaggacaggacgacgaaaccacgccgcgcccattcgatctgatagttgtcccacttttccttcatgccgttgccgccatgcgagaacacgatggtgggtgcgggtgtcttgtcggtggcggtgtcgggcttgagcatgttgatgcccagacggtgaccggaggatgattcgatgatcaggttttccttgtcgactttgccgaagtcggtttgtgcgaggttcgccaggcagctgccgatgatgcacagggccacggcgagtatggtcgccgccccgtacacgtgggttttgatgtaatgccaggttctggacatttctctcctctttccttgtcatgcgcgttgcgcgtgttcggaattccgccctcccatgggcgtcgccgttccgcttcgaaccggcgtactcatgatgttaaccgcgttaatactggctttccggcggcatgctgcacaaatgtgcacgtccaaaacgtttcacctcaatgtccgtctgcatccaacgggcgggttcatgcggattgccgtcggaagcacaggaacacgattcgcgctaacatgcacatatgtccaaggacctgatgacctcactcgcatcgacgcagacgcgacagcacatcgaaacgctcatcaaagtggcgcaactctactacgaggacggactcaaccaggcacagatagccagacaagtaggattctcccgatcctccgtatcacgcatgctcaccgaagcacgggaggaaggcgtggtccacatctccataggccaccccttgcaacgactcgtatccatggaaaacgcactgaagaagaaatacgggctgaaatgcgtgcgcgtctccgcctcatacggcgacgacatcgactcgatgctggtcccccaatgcggcgccgccctcctcatggagaatctgaaacccgattccctgatcctcacctccaccggcacacccatggcatcgaccgtacgcgccctgccagtgctcgactacccgcatgcccatgtcacccaaatgctcggctccctgtcccccaacaatcccctgaccgactcacaggacatctgccgcatgctcgccgagaaactcggatgcccatactccactcttcccgttcccatggtcgtcagaaccgcacaaatggcagaagcattgcggggagaggacatgatcgccagcaccctcgccctgggcaaccgtgccgacatggccatcgtcggcgtaggcgccatccgagaaggccattccggtcgcattttcaactcgttcgaagacgcggccatcgcgcgtcagatggaacgcgacggcgtggtggggcacatctgcgggcatcacatcgacgctcaggggcgacatgtgcgcacttcgttgtgtgaccggaccatcagcgtggatttcgaccgtttccgtgaaatccctttggtgatcggcatcgtatgggagctatggcgcgcgaaggctttgcatgcctgtcttgtcggtcatctgatgagcgggctggcgacgaactgtggcatggccgagctactgctcgacatgccctgaacgacataggtgcagagcggcgatcaacgccgccgacgcaaccagataccacgccacgttccctgccaaggacaatgagtaggaaccggtggcatcgaacatcagcccatgcaccgtcgtggcaatcgccaccgtcgcctgtcccgtcgccgtgatcacggacaacggccgcgcataatcaccttcccccgccacctgccgtatcgtccaaggcaacgcggtgagcagaatcgcctgtcctacgcctgcgcacaggcttgcgcccatggctatcgacgccgacgtggcaagccatattccgatccagccgatccacccgattacggaatacaggcccatgactagcgacgggcgccgtccgtccagcaaaagaccgagcgtgctcttgccgacggccgagccgatcatgcgtgcagacaccaccatcgacgcctgtcccaaggtaaggccgacggcaagctcatgggctgggacatgctggttgatgccggacgcgatctgcagcaacaccatggagagaagcagtaacccgaacgccagatgacgccgatatttcttctgactgtcagacaaagatgcatcaggaatgttggtttggctcttctgcacatcgggagcattgcgtggcgatggtcgttccatgaccgtcgccgcgaaaggcagcaacaacaacaggaccgtgacaccggtggcggcgtatgccgtgcgccacccataggcggtgatcatatgcgacaccaacgggttgaacaccgccccacccaacccggacaagcatccggcgatgcccatcaccgtgccgaaccgtgtcggaaaccacatggacagcaacacgggtggcgccaacgtcaccggaaccacataggaagcacccatgacggcgaaagccgcgtcgaactgccaggcactgtcgaaccatgcgcaggcgaggaacgccgtcgtacacacgatgacgcaaacggacaacgccaccctcagattcaaacgggagaacacgcgtccgaacagcagcatcgccaacgcgctcacaatcaatcgcaccgacaccgggaacgccgctgccgtacggctgatgcccaggtcctggccgagtgcgtcgaagtacagtcccgccgtattgacaatcagaccggaaccgacgaacgacatgacgcaacagccggcgaacaccaaccaacgtcgagaaccctgcgaatatacagacagcatccctcaacaatagcggcggaagaaccggatgatgccattgaggacatccaacgcttccgtgttgtcgggcaagcctgtctccttgacactgaaatcatggtccaacggatgcgacaaacccctgggcaggacccgcacctcgtagtcatgatgacggtattggaggatacgcgcgaactccagcgtattgtccgcgagataatcctcggcgctggagaccatgagaatgggaggaaggttcccgtcgacgacgagacgatccatgtccaggtatggggtgatggcgatgcgatccttgggcgtggggaagaagccgctgccgtaataggccatggctgtgccatgggcgccgccttcgaaacggtacatgccgctcactcctgcaatgccgcgtatgcacaggccactggttccgggcgagacgcacagttgcgcggcgacgatcggagaatggagaacagcacacagataaaggtcaagcaacgtggccgcggaatccccggtaatgaatactcgcgtcgtgtcgaacccgtgttcctcgcaatgcttggcaatccagtccaatgcgcggaccgcatccgcaagctgatcacggaacgatacctggggtacgagccgatagttggcgttgacgaccgcgaacccatgcttggcgaacagcatgtcacgacaggtggtgttccgtttgtccccgtgatacagaccgccgccatggaaatccacgatgaccggcaacgatttcttcgtcggaatgtcagcgggacgatggacgtccagcttgtgcagaacgtcatgtgatgggtcagactcaccgacataagggatgtccataacggaagccacgccctcaggcttatgttcaagccggagacgttccgcatccccgccatgccggaatgccgtattcgcttcgaacagacgaagcgtttcctcatcaatcatcaccatctcccatctccggccgcattgccgcggattcatcgtcaattccaatgtacggcgtattcggaccaacaaaggacgatgctccgcacaaatgtgcacgactaggccagatgcgaaaagggttcctcccgacaatgaaccgcaccccgattgttggactgaggaaattcagattcgatgatcggaggtgcggttctttcgtatgcgtgaggatcggaggaaacgttacgacgacgggttccggcacgaggcgctggggctcatcaaggccggcgcgggcaagcatttccttgcccgccggcttgcgatgcccgtgcagaccgcggaaaaatggatcatgaaatacaggtccaacggagaggacgcggtcatgggcgcgaagggcaaacgcagctacgactgggggacgaaggtcgcggccgcccgcgaccacgtcgacaacgacatgaccaagacggaggtcatggccaaatacgcaatcgcgagcgtcgcgcccctggagcgctggtgccgcgaataccgtaccggcgggcccgaggccctgcgcccgaggcccaagggcaggccgaggggcgcgagatccggtccgaagcccaagccgacgcgcgagcaggagctcgccgaggaggtcgcctacctcagggcgaaggtcgcgtacctggaaaaagtgcgcgccctgcgggcgtggaagtcgcgaggcgcgagcgaagcgccatcgtgcgatcgctcgcagggcggggacaccggctcgaccacttgctgagggccagcgggttggctcggtccacgtactaccgtcacctgtctcatccggagcatgtgacgcgagccgacctcgaaccgctgatcgcggcggtctggggcaggaccgccaacgggtgcgggcaccggcagatccacatgtgcctggtccacgagttcgggcggagggtgtcggccaagaccgtgctcagggtcatgcgccgcatggggctcaagtgccggatacgggcggcgaacccctggaggaagtacagctcgtacaggggcgaggacggcgaacgggtgccgaacctgctcaagcgcgacttccgggccgacaggccgttcgccaagctcggcaccgacgtcaccgagttcaaggtcgcaggcgccaaggcctatctcgcgccggtctatgacatggccagcaaggagatcatggcctgggacgtcagccggcatcccgacatggaacagcagaagcgtctgctcgccatgctcgcgcccaagctgcccgccggcgcaagccccgtattgcactcggacatgggatggcagtaccggcacccgtggtggcgcgaacggctcggggaactgggcatacgacagtcgatgagccgcaagggcaactgtctggacaacgccgccaccgaacaggtgttcggccatctcaaggacgagttctaccgcgaccgcgaattcgactcgtacgagcggttcaaggccgagctcgacgactacatcatccactggaacaccaaacgacgccagatacgactcggtggacgcaccccggaggaattccggagagcgtccaccgtggtctgagcctgtatcctaataaacagcgtccaacaatcggggcgcagttcacaatcggaaggaccccttttcgcatggcaactaggctcagaccttgctccgacggcgcgaaagcaacccgacagccagaccagccaacaatcccgcaacacaagtcaggatgttaggcaagccggtctgcatatgaccggtcgccggcgtctgcaccacacaggcttgtttgacggtgatcgggatcgatactgtacgttagatggtttggatccggtatgcgataagggattgtcggaggcgctggaagagattaaccgtaagtttggcgcgatgcatgcgggtatcggctggggtgacattcgcggtgacggtcgtacgaacgaggagaccggtggtgagtggcggactcggcttaataggttgtcgtcgtgtgccacgaccagatgggatgagatcgctatcgcacatgcctgctagcaggttcatgtctacttagtggctccgtgcattgtttcctcgtggttaccggtttcggcaggatcgtaataacttgtgcgatgttctgtaactcgccgtaacatgtgcccccttatggttaaagctataagtaaacaaagttttcctcgttttccttctaaaccaaaacgtgggccggaattggttccgtcctgcgtttcagggtgggatcacagcagatcacaagggaaggaaatgttatggctcatcacgatctcatcattaagaacgcggacatctgcacgatggacgcgaacatgacccgcatccaacacgggtatgtcgtcgtcgacggagaaaccatcacctctgtgaacgaaggttccgtgcccgcaggagtggaggcggatactgtcattgacgccgagggtcaggtgctgttccctgggttcatcgacactcatactcatatctttcagtcattcctcaagggtctgggagcggaccatcatctcatcgaatggctgaaccgttccgccctaccgtacggcaagtacatgactccataccagcatcgtctcgccgcgcaactgacctgcatggaagccattaaaagcggttgcacgacgctctgcgagttcttctacactgaccaggatcctgagctggccgacgggtgcatcgccggcatggaagacacagggatccgcagcgtgttcatccgcaccttccaggactgcggcgaagactacggcatgcccgcatgcttcatccaaccggcagacaaagccatggaagaagtcagccgcctacgccacgattacgcggaccgtagcgacatgctctccatctggaccggtccagacgtgacatggtccaccaccaaagagggataccgtaccatgttggactactgcaagtccgagaacgtgcgctacgcgatgcacatcgacgaaaccgaagtcgatgacgacatgtgccagaagcattacgggcaagacatcataccaatgctggacgacatgggcttcctcacggatcatatgctcggcgtgcactgcgtgaacctcacccctgacgagatcaaacggttcgccgataacggtgtctccatcagctacaatccggtctccaacatgtacctggggtctggtgcggcgccgatccgcgaagcattggatgcgggagtgaacgtgtcgatcggcaccgatggcgcggcctccaataacaccaccaactatttggagagcatcaagttcgcggcgctcgtgcagaaagggttcacgcgtgacgccgcccgcatcaccgccccgcaaaccatccgcatggccacgaacggtggcgccaaggccatcggcatgccagacactctcggagtcgtggagaagggtcgcaaagccgacctgattctcttcgacccgcgcaaactcacttccatgcccatgcatgatccttacgcgacgaccgtgtactcgtccacgccggaaaacatttccacaaccatcgtcaacggcaagatcgtctaccatgacggcaaattcgcctgcggtatcgacgaacgtgacctgtccgacgcgatcaacgcggagctaaccaaactcaaatctcaggttgacgcctgagctctaacctcaccccgttccaatctggaacgtccctcgccaccacgccagttgacgaacctcacacatcacgttgaatttggaaggaaaactatcatgagtaaggaagaaacgccgcaactcgtagcgggcatcgacgacaagattccagtcggcaagtccatcgtcttcggactccagcacgtcctgtccatggacctgtacatcatgccactcatcctgggtggcgccatcggcctggcaggaggcgacctgtcctacttcctgcagatgagcttcttcgcctgcggtatcgccacactcctgcaaagcggactgttcatgcgttatccaatcgtgcaaggcccgtcctatgtgcctctcgccgcactgtgtatgatcggcgcgaccatgggcattcccacaatgattggtagcctcatcccgggtgcgatcatcatcatcctactgggcatgagcaaactgttctccaagttcatcagccgcgccatcccaccgttcattggtggcatcatcatcctcatcgtcggcctcaccctggtgcctaccgcggtcactggagtgttcagcaccaaaggcaatctgaccgctaacgctttgagcggctgtgtcacattcattgtgctgctcgtatgcatggtcctccagtacaagctgcgcaacagtggcattctccacatgttctccgtgatcatcgcacttctcgtcggcacactggttgccgtcagcatgggcgcagccgacttcagcagtgttccgggagccgcatggttctcactgatatgaactgatttttgttccgcatttcctctaactcgatgggagatgatggaaccatggcaaagggcactcgatatacgccggagttcaaggcgaaggcggtcaggctgctggcggaatcgcgttcctcgtattcgtcggagacgaacgcgatctccgcggtggcgaaggatccggggatagcgccggaatcgctgcggcgttggcgcaaccagtcggacgcgacggtcgcggaggagacgaggcagtcggccgaggacgcgatggcggagctgaagaagctgcgggccgagaacgcggaattgcgtcgggcgaacgagattttgacgacggcgtcggcttttttcgcggccaggctcgacccgacacggcgttgatggccgcgtacatcgacgggcatgaaagccgtttcaaggtcgggccgatccgcagggtccttttcgaatcgttggactgcgggtttctcacgccgcgcggctgccgcatgttcagaacgcgtctcgtcagccgcatgcgggcggggcatggggcgctggcccgcgacatcctccagatccattcggatttcttcatggccgtgtacggttacgggaagatgcacgcgcagctggtcgcccagggccgggatccggccggggtcggccgcgaccaggtgatgaacatcatgcgcgagcttggcatccggggcgtgcgccgcggcaaaaccccggtgacgacgaaacccgccaagggcacgggcggcaggccggatccggtggacgggaggttcgaggcttgtgcgccgaaccgcctgcacgtggccgacatcacccacgtgcgcatggccaacggctcgttcggctacacggcgttcgttgccgacgtgtacgcccgtcggatcgtgggatgggcgtgcgccatggccgtgaacacgcaggagctgccgttgcaggcgttggagcagacgatctcatgggccgcgtcccgcggcggcgcggatggtcttatccaccacagcgattaagccgggtttgttgttaagccggggaacggttcggggtcttggtggctggccgtgtcccatgtggtttcccggcttaacgttccgggttatttgagggtgtgtagttgtcggagtcgttgctcgctgagccatgtctccttggaggggtcggggccggggttggccgcatcgacggctttgcgcatcatgtcgagggtcgcgaacgcgtagaacgcgctggttgtgctcatgctttcgtggccgagcagttgcatgatgagcggtagcggcacgccctgttggtagaggtccatggcgcgggtccggcggatcaggtggcagtggacgcgttcgggcatggacgggcacgtcccgcggcgtgctctggccgccgcggttttgaggatctcgtcgatccggtccacggagagcggctggatggcgccgttcctcgtcgagtggaacaacggcctgtcgccgtcgcgcatggacggtccgggatggaattcctcgaggtaggcggccaggtgggttcgtgtcctttctcccaggggcacgacccggctcttgccgcgtttgccggtgagcgtgaccctggccggcttatccatacccacgtccgcgatggtcagtgcggcgagttcgccgatcctggcggcggtgtcgtacatgaggatcgggagcatgcggttcctgcgcgatttggcgtcgccggtgccccatgcggtcagcaacgctttggtgtgctcctccccgaggtggtcgacgggtttgcgcgcgggtggtttgacacgtatgccggccgcgtcgttgcccagcgcggtcaatgccgggtgttcgaggcccgcgtggtcgaggaacacgcgcatcgtcgtcatcctcagcatgatggtgcggtccgagtacccgcgctcggtccgcatccattcgacccaccggcccaggcgcgcccggtcgaaatgcccgaaaccgatgtggctgcgctgcgtgccttccgtggtttcgagccatcggacgtaggattccaggccgatgcggtacgcctcgacggtcttcggcgagctgccccgcaccttgggcagccagtggtgcagccagtcgcgcgcgactcgccagaagtccggttcaccggagctggcggccgttttccttgccttgctcatggttcctccgtttccgggaccacgcgttcggcgtcggcgacgaggtccgcgtatccgtccatgaaatcggggctggcgtgcacgtagtagagggtgctgtcgatgccggcgtgtcccatgtaggccgccagatagggcagcatcgccatcacgtccacgccgtcgcgagtccaccgctcgatgttcgcgaacgcgaaccggtgccggaaatcatagggcctgggccgtttgccggcttgtggccactcgagcccggcccgcgtccagacgcggcggaacaccacgccgggcatgcccggggagaccggattgccggtggaggtgacgaagaacgcgggacggtcgtctccgaagcgttcgcgggaccgttggtcgcattccagcagttcggcggcgacctcgtcgcccacgggcagcctgcggctgcgaccggccttggaatcgaccacgtcgatggaacgggccttgtggtcgacgtgcccgacggcgagtctcctgacctctcgggtgcgcagcccgcagcaggccatgagcatgaagaacgcgcgagactgccacgcccacggcgacggagactccaacgttcccgcggcccgcaggaacagggcggcctcgcggtccgtcagcaggtacggcgtcggacgcggggatccggccttccactggtcggagagcacgtacgcgtcgggatcgtgggccagtcgcatccacctgccgaagtccctgatgtacgagaaccacgagcggcaacccccgggattcgcgtcgatcctatgggcgatccatcgctccacgacgccccgctccagacgcacggccccgtgttcgaggcaatgccggtcgaacgagcgcaggacctggacgcgggtggcgccatgcctgcccatggacgccttgaaacggatgtactcctccaattcgccggcgagcgggccgacgaatccgtgttccgtgggtctcatgacgatccgccttccggcacgggcagcacgcacgcgagcattcccccgcggtgcgtggccatgtagacgcgtgtggaatcggggtcggcgtggccaagcaccgcgctgatcgtcggcaacggcgtggccgcctccagcatcctcgtcgccgcgttgcgccgcaacagcctggaaccgccccggcgtccgagcccggcgtgccgcatgacacggctgatcgcctcgtacaccgatgaatgaccccgaagcgcgacatggggcgccttgtaccgcacgaacacacggtcgtcgtcggtggcgggcctttcgtccaacagccaggacgccagcctcgcggccagcggtcccgtcatcggcacggtcaacggattgcccgtctttcgctgcaccagacctatgctcatggaatcccaatccacgtcggcgatcctcagaccgatcacatcgcatgccctcagcccgcacgtcagcgacagcagggtgatcgccgcgtccctcgacggcaccgaccgcgaggcgcacgcctccagcaagcggcggtgctcgtcgtcgggcaacgttcccgcgatcgcgtgggtcctgcgtatgccggccaggccgatcgcgtccgccaggtcatcccgcccgagccatctgaacaacgggcgcaggtccgacgcggcgtgccgcatcgacgactccgaccagcgtgaacgcagcccggccatgaaccccagcacatgcgagccatccgaaccgtccaacgacacgaccccatgagattccagccacgtgaggaacaagcccgccatccgacggtaatgccccaccgtcgccgaagccagtcccgaaccggcgagatacgcctcccaacgctccatgaccacggccaaacccggaaccaccggctccgcaagcctgctcctgcgccacttgcccaggtccaccgaaccggaccgcagatacgagtcgcacaaacgcgccagcctgccgtaatcgaaccaccgctgcctgctgaaaccgcccgtccgctcactgaaggtcgacgcggcgaaccccgcgcccaacccacgcgtgtacaccgcatccgggcctccggcgtaccgttccaacgccctgatggacttgcggtactggcctatggtggattccatataaccggccccgtaaagcgcgcggaccacctcgcccgcgacatggccaaccgtcgtctcacccatggcaaactccttcgttcgaatcaaatgggacaagacgaacataacccggaacgttaagccgggaaaccacatgggacacggccagccaccaagaccccgaaccgttccccggcttaacaacaaacccggcttaatcactgtggatgatcggcttctctccgtccttgagcgtggagcaggcgtcggtgagcatgccgttggccagctcggcgttcgggctcgtgccgatcgtccaggcgaccggcatgccgtcatggcagtcgatcacgggcgacaggtaggccttgcccgcggggatcgagaattccgtgaggtccgtgacccacggcatgttcggccgttcggcgtggaagtcgcggttcaccaggttcttcggcgccttggtgagctcgcccttgtacgagctgtaccgtttcgcgcttttgaacaacggtaccaggccgtgcctggtcatgagccgcatgatccgtttggccgataccctgacgcccatgctttccggctccaggtggatccgcttgtacccgtagcggcgttcgctgttctcgaacgcctcgcgcacgagctccagcagcggcgcgtccttgtcggggcgtttcatggcgtcgggctggtagtggtacgtgctgcgcgcgacgcccaccgcgggcaacaggcttccggcggtcacgcccagcgtctcgccagcggtcttgacgaggatcgtcttctctcggctggccgggttttccgggtctgcgcccggctcttttcccaacagctccaacgcgcccttccggatcgcgatctcgatgtcgagttccttcttctcccgtcgttgccgttcgacatcggcgtccaactcgtccagacgggcctggagctccgccactttcctctccatcgacgccaacgcgtccgccggaccggccgcgtccgacgcgttcggagccacggtcggcttgacggacggctccttggattccacgacggtccttcttttcccggatccggacacagtcgcctcctcggatttcgcgagcatctgccgtttccattctcgcacagtcgcgtcctgcacgcccagttcggctgccgcctcacgcgattccggccgtccggacgcgaccgcgaccaccgcctcgcgtttcagctcctcggggaccggaccgtgcctcaacttgcgttggccgggcgcgagctcgtcgatccacgccatgagcagttccttgcttttcggatagccgagcatccgcatggtgcggccgggccgtctgccgtattcgaggtaatggtccaccgcggcccgtttctgcccgtccgtgtaccgcctgtagcgttccccgcgcccggagggaacgccggtgcgctcctcctcgagccggtccgcgtaccacgacggcaacacgcccttgctgggatagccgagctcgcggatcacgtcggcggcgcagcgttcgtatttgatgtacaggtccacggccctgtcgcgctgctccctgctgtacttcgccatgagggggttctcctcccggtcagggagtccaagaaaacgtcaccacctcgaacacgaaacaccgacttgactaaaaacacgcggatcgaatcgcccaggcgcagccggtcggcgatcgggatgcgctcctcctgattgaggtagcgcgcgtggatccgtttgggtttgtccatggtggaacgataccagtccatgcttgccttttcgttcctcccggtggcgcgggtgcgcccgttgcgccataccttgccggtgcgcttggagaccccgaccgcatgggctgcctgggtgaagttcatgccctcctcgtccagcagacgcacgtgctcctcgcgcttcgccgcgcacatcagcttcctcgtcggatattcgacgccgttgaacgtccaacggcgttccccgccacggtcttcgtttcggtggctcctggtcacctgaccctccttgcggtaggtcatgtgttgcaacgatcactagaactcgccgtgcttgacgcgctgcacaggggggtggagtccggaactgatcgaggggccgaattccagcacgtctacaacgaggagcggccgcaccgcgcgctcggccggcgaacccccggagaagcgtaccgcgccaagggcaaggccctgcccgaccccgaactcgcggccaggacgcagacaaaactcgacgagcagcggcgccgcgagacgacggccggcagccccggggcgacgcgcaggaagcccatccccaaggacaaacgagccgaaccggcgcgagcggacgtcaccatagggcccggaatccacaggatcgacaggcgcggctgcgtcacgcagaacaacatcgccggcaaacgccggatcctcaacctcggcaaacacaacgcaggacgcatggccgaactgctcatcgaccacggccgggccgtcgccaccgacctggagaccggtgagatcctcgccgaccagacgctcgacgccacccgcgaataccaataccgcaagccggcgaacgatgtcaacgatgccccacgacagatgtaaagcatgcctcaggagacccgtcaactatgccccaagacatcacacgcctcggctcgcggctcaccgtggacttgtcccggccgatcctctccgcggtccgccggatgcccggatgctgctcgcaatgcagcttctcgatcaggatcctctcctcggacgacaggtgcgaatactgtcggcccatgagtgcaacaccttcttgagctggaaacttcgaacacttccaaccctagacaaggtgttgcacttctatttagaactcggggggtcctgcgttttagcggactgcggtagcatgggaaccatgattctgcatttgcatctggttcgtcatgggcaaaccacgttcaataaatacaaccgtcttcagggatggtgcaatgcgccgctcaccgcatccggacttgccgatgccgacagggccgggcacaaacttgagggctatgattttgcggcggcatattgttccgatacttctcgcgccgaaatcacagcgaagcgaattctcgatatcaatgaggctgccggacatgcacggccagaacttacggccgatatgcatttccgcgaacaatgctacggatacttcgagggtcaggacatgtcgctggcttggaccgctgcgggtggacctcacggcgcgaaggactacaacgacatcgtagccaaatttggtctggccgcctcgcgcgacttcctcaaagaggccgaccccttccatgacgcggaatccgacgaggaatactgggcgcgggtcgaaggcgcgttcgccctcatcgccgagaacccggccctcaaggatggcgatgatgtgcttcagatttcgcacggtaacacgctgctcagcctcggccaccgtttcggaggccccgatcttgaccttagcgaacgaccggccaacggctcggtaaccgtactcgacttcgacacgaccaaaccgttttcgcaggccgtgaccatcgtctcatacggcaaatagcgtatttcatcgtcagttgcacgggtaaataggggaggagtgctacccttatccgagtaagtgtgacctcaaggaggcaacaatgggagtcggagagatcgcaggcctgattgcggccatcgcgttcgcagtattggccggattcatgatctatccgctaattcggttgggcaagatgttcgaccagatttcgcagaccgtcaaggaatccggtgagcatgccatccccgcattggatgagggcgtgaccaccgtcaagcaggtcaacaagtcgcttgaggatgtcaacaagatttccgctgcggcctccaccaccgccaacaacgtgggtgccctgaccgatttgtatggatccttccttggcaagccggttatcaaggtcgcttcggccttctatgccttgaaggccactggccagtcgttcctggctcagaacgccaacaagaccgctcagaagggggagtgatgttcaaacgcatcttttgggtgggcgtcggtgtggccatcggcgtgatggccgtcaccaaggcacaggcctatgtcaaggccaatacgcctgacgcggcccgtcagttcctgcttggtcccgatcaagacaatgtgccgatgaagacgctcgaaggcctggtcaatgaattcaatgcgacccgtcgagcccgtgaggctgagctcaatcgtcagtacactgagcgcgccaactgacacgcgcacggccttacgcaatcctttaatccatactttccactgatagtggcgcaattgcgcccgaaacaaacctacaaggagttcatccgctcatgcgcactgcggacatcgccaagcgatacctcgactacttcgccaaacacgaccatctcgtcatgccttcggcgtcccttatttccccgaaccccaccacgctgttcaccatcgccggcatggtgccgttcattccctacctgcttggtgagcagaccccgccgaagcgccgcatgacttcgaaccagaagtgcgtgcgcacgctcgacatcgacgaggtcggcaagaccacccgccacggcaccttcttccagatgcttggcaacttctccatcggcgactacttcaaagaagaggccatccactacgcctgggagctgctgaccaccccgcaggacaagggcggctatggcttcgacccggaaaagctgtgggtcaccacctttaccgacgacgaggaagcccgttccatctggaagaacgagggctttgatcccgagcacatgcagattttcggtatggaagacaacttctggaccaccggcggccctggccccggcggcccctgctccgagatctacgtggatcgcggccccgaatacggccgtgatggcggccctgcggccgacgagacgcgctttatcgaaatttgggatctcgtgttcgagaactacgaggtcgacaatgtcaagtccaagaccgacctgcacatcgtcggcgagctggcccagaagaacatcgataccggcgccggtctggaacgtctggcctacctgatgcagggcaaacagaacatctatgagactgacgaggtcttcccggtcatcgaggccgccgagcgcctgtccggccgcaagtacggcgaggacgaggccgcggatgtcaagttccgtgtcgtggccgaccacgtgcgttccgcgctgatgattatgtccgatggcgtgcgcccgtccaacgtcggccgcggctacgtgctgcgtcgtctgctgcgtcgtactgtgcaggccatgcgcgtgcttggcgtgaccgatccggtgattcccgagctgctgcccgtctccaaggaggccatggtcgccagctacccggagcttaacgacaccttccacgatgtctccgaagcggcctacggcgaggaagatgcgttccgtcgtacgctggagaacggcatcgagattctcgacgtggccgtcaagaaggccaagaagaccgccgacccggtggtctccggctctgatgcgttcactctgcacgacacctacggcttcccgatcgagttgactctcgaaatggccgctgaccaaggcgtgaaagtcgacgaggccaagttccgcgagcttatggccgagcagaagtcccgtgcccgcgccgacgccctcaagaagcgccacaacgtggacctgtcggtctatgacgacttcaagaagacgctcgccaagccgatcgacttcctcggctacacggacatgtccgcccgcgccaaggtcatcggcatcatgcaggaaggcaagggctccgtgcccgccgtcaccggcccggccaacgtcgaagtcattctcgaccgtaccccgttctatgcggaggccggcggccagcttgccgatcagggcgagattctctccgatgacggcgccgtgctcgaagtcgacgacgtgcagaagcccatcaaggacctcatcgtccaccagtgccgtctgaccgaaggcacgctggtcgtcggcgccgaagtcaacgccaacatcgacttggcccgccgtggcgccatcgcccgctctcacaccgccacgcacatggtgcacaaggcgctgcgtgaggagcttggcccgcaggccactcagcgtggctccgaagacgccccgaaccgtctgcgcttcgacttccagtggtccaaggccccggccaagtccgtgatctccgcagtcgaggagcgcgtcaacgacaagctgcgcgacaacctcgccgtgaccaccaaggaaatgaagttcgacgacgccatcgcactcggtgccatgcacctgttcggcgagaagtacggcgacatcgtacgcgtggtctccatcggcgaagacggttggagccgcgagctgtgtggcggcacccacgtcgaccacgtcggcaagatcggtatggtcaacatcctgtccgaagcctccatcggttccggcgtacgtcgtgtcgatgccgtcgtgggccagggcgcatacgatttcaacgctcgtgagcacgcgctggtctcccagctgtccgacaagctcaacgcccgtccggacgagctcgctgagcgtgtgaacaccctgctcgccaagctcaaggaatccgaccgtcgacttgcctccatgtacgaggcccagctcgccgccgctgttccggctctggtcgaagacgccaagaactccgctgctcccgtcaaggtggccatcaagaacgtgggccacttcggtgcggttgatgccctgcgcaagaccgtgctcgacgtgcgcggccagctcggtgaggacgcccccgccgtggtggctctcgccggcgtgaacgaggacgacaagcccatggtcgccgtggccaccaacgaagccgcccgcaaggccggcatcaaggccggcgatctggtgcgcggcgcatccaagatcctcggcggcggtggcggcggcaagccggacttcgcccagggcggcggcgccgatgcctccaagatcaacgaggcacttgaggcgctcaagcacgaggcacagaaggcctgataacgcccgtggtgtggttaggcgttgatttgggtaacgcccgggtcggactcgcattgtccgacccggagcttacctttgcacacccagccgggaacattcatgttgccggtgactatttctttgccatcgatgaagtgctgaatgtcgttgaggacgagcacgtgacccatatcatcgtgggactgccgttgcagatggacggcactgaaggcaaaagcgccaagaaggcgcgcagatgggccgtaaaccttgagaagcgtttgcgttccgagagagaagaatcccaagaaccccagattccgcaggtagtattggtagatgagagattgacaacggtcagcgctcatcgtcagctgtttgaggctcagaaggcttcgaccaagcataggccaatggtggaccagcagtcggcagtggtgattttgcagacggcacttgaccgtgcgggggaacagtgagggaccggttttatggcagacaatttcaacgatttcttcgacgagaacacgcattgggtcgaagggaacgcgaatccgcccagcggctcgctggaacctccgcagccgccgaagtcccgcaaggagatgcgcaagcgccgcgagaagcgtaagcaacgccataccatggtcatcattgcggttatcgtggttatcgcactgattgtgtgcggcggatattttggtgtgaagaagctcaagtctattcgagacagccagagccagacgaccgctgtcatcgctgattatccaggtcctggcgatggtgacgtccaattcactgtggaagagggacaaggtgctgatgtcattgcgaagaacctcttcaagcagaagatcatcaagtctgccgccgcgttcaccagcgtggtcatggccaatgatgccaagctgtaccccggcacgttctcgctgaaaaagcacatggcagccagcgacgtgttggccattttatctgactcatccaacgcttccggattcctggatgtcaagtcgggcgaacgtgtcactgacgttcttgatgcggccgcaagcctgtccggcattgatcgcagcgagttcgataccatcgtgaacggtggcggatccggcatcctaccggccgaggccggtggcagctttgaaggatggtttgaaccaggcagctacaacgtacgatccatgaccagcgcgtcggacatcctcaaggccatggtcgacaagcgcatcgccaaactcgatgaactgggagtccccagtggcagcgatcgtgaacgggtgatgatcattgcatccatcgctgaggccgaggtcaataaatccgactactacgccaaggtgacacgtgtcattgagaatcgtctcgatcagggcatgtccttgggcatggactctacggtggcctatggcaataatgtgaagtcggcagaagtcactactgctatgacgcaggatgcctccaacccgtataacacatatcagattgccggattgcctcccactccgattagcaatcctggcgacaacgctatttcggctgcgctgaaccccgaaccgggtgactggctgtacttctgcacagtgaatctcgacaccggcgaaaccaagtttgccgccactgccgacgaacacaatcagaacgttgcagagctgcgccagtggcaggctgcaaacgggcagtagtccatccctgctagtccctctagtggagaaaacggcaggtgccattcttgtagccccctctgatgagggggctcccgcgaagcaggtgggggagagaacttacaagacaaccccaacaacaatcgctacagtggctcccaccaatatcaccggcgcatacggcactttgcccgcatacgccggtgatttgcgttgcgggtcgaacctcgtccaccacgcgatccacgcgataccgcacatacccatggccagccaccacaccaccacaggcagcagtccgaataagccgacggacaaccccataggaaccaatgcggtcacgtcaccgaatcccagtgatttgggcacaatgagcgccaatgcaaactgaaccaagcagcacaacacggtaaacagcagtgcctgtaacagcacgaacaaatcgtttgccaccacgccataggcgaaatccgcagccagctgcagcaacgcacccaccgcgacccatgcaatcggcacccgcctgcaccgcacatcttcaatggacagtgcaagcccacatagcagaccgggcaaggtgaacaggtatggcatggcttaacattaacccctagttactgaacatacgaaacgagggatgctatgttgcgctggcagacagcaggggagtcgcatggagaggccttggtggccatgatcgaggggctgccggccggcattcgcatcagtaccaacgacatcgtctccgcgctggcccgccgtaggctcggctatggtcgtggcgcccgtatgaagttcgaacaggatcaggtgcgactgctcactggcgtacgtcatgggttgacgctcggctctccggtggccatcgaaatcgccaacaccgaatggcccaagtggaccgaagtaatgagcgccgatgccctcgaccacgatttgccgcgtgaaggtcgcaatgcgccgctgagccgtccgcgtccgggccatgccgatttgaccggcatgcgcaagtatggcttcgacgatgcccgtcctgtgctcgagcgttccagcgcccgcgagaccgcctcccgcgtggctctgggtgaagtcgccaagcagttccttgagcaggcattcggcattcgtaccgtggctcatgtggtggcgctcggcggcgtgcagaccagccccgacctgccgctgcccactccggatgacttggaagcccttgacgcttctcccgttcgtaccttggacaagggagccgagtctcgcattatagagcgcattgacgaggccaagaaggctgccgatacgttgggcggtgtcattgaagtacttgcctatggtgtgcccgcaggcatcggcacctacgtggaatccgaccgccgtttggacgcggcgctggcctcggcaatcatgggaatccaggcattcaagggcgtagaaattggcgatggcttccttgaagcggctcgccccggttctcaggctcacgatgagatcgtggtcaacgcggacggccgcatcgaccgactctccaaccgtgcaggtggcatcgagggcggcatgtccaacggccaggtgattcgcgtacgtggcgccatgaagccgattccctccattccgaaggctctgcgtaccgtcgatgtgctgaccggtgaatctgccgcggccatcaaccagcgttccgacagcactgcagtgcccgccgcctccgtggtggccgaagccatggtgcgcctgacgctcgccaagtatgcattggagaagttcggtggcgacagcgtggaggagactcaccgcaaccttgaggcgtacctcgcttcatggcccgagcacatgcgctgagtcgccggaacacgatcaagaaggttcatacgctatgacagcacgtccccacgccgtaatcatcggcatgatgggtgccggcaaaacccgtgttggcaaggaagtggcgcacatgctgcggctgccattcgccgatgccgatgtggaaatcgagcacgaggtgggtatgaaaattcccgcctatttcgataagcatggtgagcccgccttccgcgaggttgaggccgatctcatcgctgattttcttgaggattttgacggcattttctcgcttggtgggggagcgcccatgacgccttccacacaggaagcactggtggactatatcgcccagggcggttgcgtggtgtatctcgatgctgacccgaaagaggcgatggaacgcgccaatcgtggcggcggacgtcccatgctcaatggtgacgccaatgcccgctggaagaagctcttcaaggaacgcgatcccgtgttccgcaacgtggccaatgttcatgtgcatacccgcggacttaccccgcagggagcagccaagaaggtgatagatatggtttcccaacgaacggtgcatgtcgatggtgccgccattgaaccttatgacgtggtcatcggcgaaggcgcgatgaaccgtctggtcgatgttttgggttccaagccggtccgtatcgcattgattcatactcagccggtgcagcggcactccgaccgtgctcgtgcattgctgcgtcaaggcggttatgaggtgtccgacatcgtgattccggacgccgaacccggtaagaccatcactgtggccaatcgcatttgggaacgtctcggcaacgaaggcttcacccgctccgatgccgtggtggggttgggcggcggtgccgccaccgatttggcgggctttgtggcggctacgtggatgcgtggcgtacgctatgtaaactgcccgacctccctgctggccatggtcgacgcctccaccggtggtaagactggtatcaacaccccgcaaggcaagaaccttgtcggatccttctatacgccagccggcgtgctggccgatatgaacgctctggtcaccttgcccaacgacatcttcatcgaaggtctcggagaggtcgctaagtccggtttcatccgcgaccccgaaatcctgacgattcttgaacgacatgccgcgcaactgcgcgctttcgacggctccacattccttggctcgccgttggaagatgtggtcgccgaacttatcgaacgcacggtaacggtcaaggcctatcacgtttcctccgatctcaaggagaaaggcctgcgtgagttcctcaactacggtcacacactggcccatgccattgaacagctggagcacttccgctggaggcacggcaatgctgtggcagtcggcatggtgtatgccgctgaactggcgcatctgaccggtcacatcgatcaggatctggttgattaccatcgttcgctgctcacttcgctgggcctgccgacttcatggaacggtggcttgttcgatgacgtgctcgctttgatgcaccgcgacaagaaggcccgcggcaacgagctgcgcttcgtggtactcgactcaatcggccacgtggttcatctcgataacccgcccgccgatgccgtggaagaagccttccgccgtatccagcaataaatctgagcaaccgtccgctcctggctcccctcagtctcgctacgcgagccagctccccctcagggaggggaaccagagaagaccttggctcccctcagtctcgctacgcgagccagctcccctcagggaggggaaccagagaagaccttggctcccctccctgaggggagctgtcagcgaagctgactgaggggaacctgacgaaggagcaaaacatgaccaaagtaatcgtcgtcaacggcccgaacctcggtcgtttgggcgtccgtcaaccagacgtctacggccgtcaggatctcgacactttgcgtgaactctgcacccagtggtgcaaggagcttggtctcgaagtcgaagtgcgtcaaactgacgacgaagccgaaatggtgcattggatgcatcaggccgccgacgaaaagacccctgtggtcatgaaccctgcggcctttacccactacagctacgctctcgctgacgctgcccacatggtcatcgacgaaaatctgccgctgatggaggtccatatctccaatccgtccgcccgcgacgaattccgcaaacgttcggtcatcagccctgtcgccaccggcaccatcaccggcatgggcttctacggctacaagctcgccctcgacgccgtagcccatctgctgtccgaatagtcgcgatatatccttatggaaaggctttgccgccgcggtggatgcggcggcaaagggattcaacgaaaccgtatgtcggtaacacgccgggtcatacgcggatgatagagtgaaattccatggttagaagaacacatggtaattctcaagaacacgtcaccaagcatattttcgtcaccggcggcgttgtttcctctctcggtaagggtctgactgcctcgtctctgggtcgtttgctgcgcagccgtggtatcaaggtactccagcagaagcttgacccgtacatcaacgtcgatccgggcaccatgaacccgttccagcacggtgaagtctacgtgaccgaagatggcgccgagaccgatctcgacatcggccactacgagcgtttccttgacgttttcctctcccagaaggccaacgtcaccactggtcagatctatcaggaagtgctgcgtaaggagcgcgccggcgaatacctcggccagtgcgtgcaggtcatcccgcacatcaccaacgagatcaagtcccgcatgcgcgcccaggcttccgatgatgtcgatgtgatcatcaccgaaatcggcggtaccgtcggcgatatcgaatcccagccgttcctcgaggccgcccgcgaggttcgccgtgatctcggtgccgagaactgcatgttcgtgcatgtctctctggtgccgtacatctccgccgcacacgagctcaagaccaagcccacccagcattccgtgatgatgcttcgtcagcttggcatctccccggatgccttggtgcttcgctccgaccgcccgctcaaccagtccatcaaggacaagatcagcctgatgtgcgatgtcgatgcggaaggcgtggtcaattgcgtggacgcgccgagcatctacgacgtgccgaagatcctgttcgaggagggcctcgacgcctatgtggtgcgtgagctggggctgccgttccatgacgtcgattgggacgaatgggccgacctgctggagcgtgtgcaccaccccaagcatgaagtcaacatcgccatcgtcggcaagtacatcgacctgccggacgcctatctgtccgtcaccgaggccatcaaggccggcggcttcgccaactgggccaaggtcaacgtcaagtgggttgcggccgaccgttgcgagaccgaggaaggcgctgccgccgcactcgacaacatcgacggcatcgtgatccctggaggcttcggcatccgcggtatcgaaggcaagatcggtgcgctgaagttcgcccgcgagaacaagctgcccgccctcggcctgtgcttgggcctgcagtccatggtcatcgagtactcccgccacgtgctgggcatcgaggacgcgaactccaccgagttcgagcccgattgcgccaacccggtgatcgccaccatggaagagcagaaggacatcgtggcaggcaagggcgacatgggccacaccatgcgtctcggctcctacccagctgacctcgaagaaggctcgctggttgctgagctgtacggcaccacgcatgtcaccgagcgtcaccgccaccgttacgaagtcaacgtggcctacaagaatcgcctgcgtgagggcggactgcgcatttccggtcagagcccggacggcgaactcaccgagttcgttgagctgccgcaggatgtgcacccgttctacgtggccacccaggcccacccggagttcaagtcccgcccgaccaagccgcacccgctgttcgccggtctggtcaaggcttcgctggagcaccaggaagctcgcggctgaacccggactattgacggcaatatcaacgtgatgtaaatcgcgccagcctatgacaaaccatggccatgaatcacttggaattcatggccatggtgcataatggcctcaaatgcataatgccgcatataaccagtaaacgagagaatgtgtaacagttcatatgaccgataattatgaacagcctgtgggcagatcgcagccgaacattgcggggagcttcagcgatgccgaagcaacagcggtattcaccccgttcgatgtagctcagcctatggatcagtcgattgatgatggcgacgccgtgaaggccaagcgccgcaagcgtcacgtatggccttggattgtattgggtgttgtcgtagtgctgggtgccggcttgggcggaggcttctggttcttccagtcccacgccttgccgggaacgactctgtggggcaaccccatgatggggcgcagccagtcccaaatcgctgccaccattgatgacacggtgaacaacaccactgttccggtatcgtatgatggcaagaccgccaagatttcattcaaggatctgggtctcagcgtcgactcggatgcccttgcatccgaagtggtgaacgccaagcgcggcgacgctttctggcagcgttacgcattctgggtgaagaaggacgtgaccaccgccccggccaatgctggtgccgcagtctccgatacgctcaaccagaagctcggcgtcaacgaagtcaagccggtagatgcagctgtgcaattgaacggtgaccagaccggtttcgatgttgttgccggcgcccaaggtgagggtgctgatgtcgctcccgtggccgatgcagcagtaaagtcggtgcagtctcttggctcatatgagccgaagaccgtcaacgtcagcctgaaggccaccaatccggtggtgacggacgatatcgccaaccaggcaaagtccacactggacaccttgctgcagaaccctgtggccatcaaggttcaagatcatcagattgccgccatcaacgcacccgcacttgccgcggctatgagcatcaacgcgaacgagaacgcgaagctgaccgatggccagacccgaaacggttatgtggtgttcgacgctggcaagctgcagcagtattacaacgacgccatcaaggccaatctgaagaccgatcatgaggaccgcgaagtcatcgtcaacaatgacggcgacgaattgcaggtcatcaaggaaggtcatgacggagtcacccttgccgatggcaccgactcgaacgttggacagcaggccgtcgaagcgctggccaagggcaatggggcagtcactcttgacggtacggttgacccgatgcagaccaaggccaccaagcggcatgtggtcgtagacctctctgatcgtttggtacacgtgtacgagaatgatcaggagatcaagactttccatgcttccgtgggccaggacaacaaccgcaccaccggtgtatgccagggtgacctgtgcacgccgaccggcgacttcaaggtctggctcaagtaccccacacaggacatgagtggcaacgtgaccctgtccgacggctcggtcagtcactggagcgtcaagggtgtgggtgacgtcaactacttctccaaggatggttgcgccattcaccgtatcgccaagtcgagcttcaccggcgacgccaccatcgccaacatgaacaacatctcccacggttgcgtgggcatcggttgggatgtgtccgactggttctatgactggtgcctgaacggcactaccgtgcacgtgcagctgtagccgtacaatcgcatatgaatcgacttcggagcccgtctgcggacgggctcttgccatagctgtgcacgtgtgcgatacatcacgtatgcgcatagccaatattcagtcgggttggtagtgtttcagcctgggttctgttaggtttacgtaggactatgtgtgaaacaaggaaggcaggatggtgaccgaaaacacagcaccaaacgccgccgctgacgtggagatgagccagtatgtggctgatcgtacccgcgtcaacgaggacaaaatcaaaaaggatgacgagatcatcagccagttcggcgattacagctacggctggcatgattccgacgctgccggcgaagccgcaaaacgaggcatagacgaaaacgtcgtgcgcgccatcagcgccgacaagggcgagccgcaatggatgctcgacatgcgtctgcgcggtttcaaggcgttcctcgacaagcccatgcccgattggggtgtggatttgtctggtttcaatgccgatgatttcaagtattacgtcaagccgattgagaagcaggctaaaagctgggacgacctacccgatgacattcgttccacctacgaccgactcggcatccccgaagccgagaagaaccgtctggtctccggcgtcgctgcccagtacgaatccgaggtgatttacaactcgattcgcgaggacctgaaaaagcagggcgtaatcttcgtcgacaccgataccgcagtgcgtgaataccccgaactcgtcaagaagtatttcggcaccgtggtacctccggaagacaacaaattcggtgcgttgaacactgctgcatggtccggtggctcgttcgtgtatgtgccgaagggcgtgcatgtggacatcccgctgcaggcctacttccgcatcaacaccccggccatgggtcagttcgaacgtacgctgatcattgccgacgaaggctcctacgtgcactacgtggaaggctgcaccgctccgatttggtccgaggattcactgcacgccgccatcgtggagatcattgtcgagaagcacgctcgcgtgcgctacaccaccgtgcagaactggtcgaacaacgtgtacaacctggtcacccagcgcgcctacgtgcgcgagggcggcaccatggaatgggtcgatggcaacatcggatccaaggccaccatgaagtacccggcttgcattctcgccgagccgtatgccaaggcatccactatgtcccttggcttcgccggcaagggccagtatcaggacaccggtgccaagatgattcatctggctcctcacaccagctccaccatcgtggccaagtccatctcccgtggtggcggacgttccgcctaccgcggcctcgtcaaaatcgtcaagggcgcctatggctcctccaactcgaccgtgtgcgatgctcttctggtcgatgacttctcccgctccgacacctacccgcatgtcgacgtgcgtgaagacgacgtctcgatggcccacgaagccaccgtctccaagatttccgaagaccagctcttctacctgatgagccgaggactcaccgaagaggaggcgcgaggcatgattgtgcgcggcttcgttgagccgatcagccgtgagctgcctatggaatacgcgctcgaactcaacagacttgtggaacttcagatggaaggatcggtgggctgattccaatgaccgataacacagcacccgtcaaggaaatccagattccggtcgccgaccccaacgacccgtacgcggttccggccgccatgccgtcttccgtggatcatgccgtacgttccttcaacgccagtgattaccccgaaccgaaccgcaaacaggacgaatggcgttacacgccgattgagcgcatcaacgaattcttcaccgtgttcaaaccctccggcgaaacgcagatcgaagtctcgatgatcgacggctcaccactcgccgaaggtatcaagcttacccaggtcaagatgggcgaaggcctgtccggtactgtctccaagccgaatgaccgcgtctctgcggtcgagtgggagtccggcgccaccgccaccattcttgagctcaccggcgagattactcagcctgtgctggtcaaggtgcacggcgcaggagccgatctcgatgccttccatctggtgatcgccgctgccgacaaagcccatgcggacgtcgtcgtggaacacgacggcgacgcacgcctggccgaaggtgtggaaatcaccaccggcaaggactcgcatgtttccaccacgttcattcaggaatgggccaaaaccgccaagcatgtgggcaaccatcgtatccacgtaggcaaaggcgcatccctgcgtcactcggtcgtgaccctgggcggcgatatcgtgcgcatccgtatggatcaggacttcggtggcgaacagggcgacctcaacatgctcggcatctactttgtcgatcccggcgagcacatcgagcaccgcacgatggtggtgcacaatcaccccgactgcaagtcccgcgtggtctacaagggcgcgcttgacggcaagggcgcacactccacctgggtgggcaatgcgctcatccagccgaccgcacccggcaccgactcgtacgagctcaaccgtaacctggtgctgactccgggtgccatcgccgattccgaaccgaacctcgaaatcgagaacggcaacatcatcggtgccggccatgcctcttcggtgggacgcttcgatgacgaggagctgttctacctcgaatcccgcggcattcccgaaaccgatgcccgcaagcttgtggtgcgcggcttctttggtgaacttgttgaagagatcggcatcccggccatctccgaacatctgatgaccgtgattgaccgacgactggcacgtggcgagaacgatgccatggctcaggtcctcgaagacaagtaagaacagcatttttttaggagcacaacaatgtcaacactcgaaatcaaggacctgcacgtccacgtcgaaaccaaggaaggcatcaagccgatcctcaagggcgccaacctgaccgttcactctggcgaaactcacgccatcatgggtcccaacggctccggcaagtccaccctcgcttacacgctggccggtcaccccaagtatgtggtcgactccggcgaggccctccttgatggccaggacatcctcaagatgacccccgatgagcgcgccaaggccggtttattccttgccatgcagtacccggtcgaagtgccgggtgtctccatgaccaacttcctgcgcatcgccaagaccgaaatcgacggcgaagctcctggcattcgccagtgggccaaggatttgtctgcggctatgaagcgcctcaagatggatccgaagttcgcctcccgttccgtgaacgaaggtttctccggcggtgagaagaagcgcgccgaggtcctccagcttgaactcctgaagccgaagttcgccatccttgacgagaccgactccggtctggacgtggatgccctgcgtatcgtctccgaaggtgtgaaccgcgccaaggaagccaaccagttcggtatccttatggtcacgcactacacccgtatcctgaagtacatcaagccggacatcgtgcatgtgttcgccgacggccacttcgtcaagaccggcggccccgagctggctgatgagctcgaagagaacggctacgaccagtacctgcccgaaggcgccgactccgagtccgcactggcctgattttgaccgattcatgtagctgacgcgttgggccgtgatgttctgttcccgggaccgctccaggccgctcgggccatgctttacgcccgggaacagaacatcccggcccaacgttacctgtaggaaaagctatatctcgtaggaattggaaacatcggaggggaaaaaatggttgattttaaggagattcgggcacagttcccgattctggatcaggagattcatgggcatccgttggtgtatttggattctgcggccacctcgcagaagccgaatgcggtgattgatgccgaagcgaatttttatcgtacgattaacgccggcgtgcaccgcggggctcatgagcttgccgcacgcagcactgtggcctttgaggaggcccgcgccaaggtagccaaactcgttggcgcgaatacggccgaaggtgaggaagaggtcgtcgtcaccggaggtgccacggccggcctgaacctgctggccactgccttcggcaacgcttcgctgggccgtgggggagcagccgccaagcgttttgccttgcagccaggcgacgagatcgtcgtatccaaggcggaacatcattcggtgctgctgccattccaggagctggcctaccgcaccggtgccaccttcaagtggattgacctgactgagaatggccgtgtgcgcacggacaatctcgatgaggtcattaccgaacggaccaaggtcgtggccgtcacccatgtgggtaacaccacgggtgccatcaccaatatcgctccgattatcaagcgtgcgcacgaggtcggctcgatctttattctggatgcctgccagtcagtgccgcatctcaaggtcgattttcatgctcttgatgtggacttcgccgcttggagcgcacacaagatgtatggcccgaccggcgtgggcttcctgtacggcaagcgtgagctgcttgaagcgctgcctccggccaacttcggtggctccatggtcgagctcgcctacatggaccatgaggctcagtacatggctcctcccgcccgtttcgaggccggcacccagccggtcgctcaggtggtggccgcaggcgtcgccgctgaatggatgatgaacatcgggctggagaacatcgaagcccatgaaaagaccatcgcggccgagctgctgaagcttggtgacatcgagggcatccgtattcttggtccgcgcgagaacgtggaccgcatcggcaccgtggcctttgacgtggcaggcgtgcatccgcatgacgtgggacagttcattgacgcccagggtattgcgattcgtgttggccaccattgtgcacagccagtacatcgtcactttggactgtatgcttctaatcgtgcctcgtccggtgtttacaattcggttgaggacgcgcaagcgttggtcgaaacggccaagggcatccgcaagttcttcggagtggagtaaaacgagagaacatgaatgattttggcatgagtggcgacgacctcgagcagatgtaccaggaggtcatcctcgaggcatccaaacatccgcacggcagagagtcctttgcacctgacgccgcatccgagcagtccggtgaggcagcggcgaatattacggttcgcgccagccacgagtactgcacgcccggcgaatcgcaccagttcaaccccacctgcggcgatgaggcaaccatccatgttgaggtttccgacgacgagccgtacaccatcaagcgattggtctgggacggccatggctgctccatctcacaagccagtctgtccgtgatggtcgatttggtcgacggtaaaaccgtggacgaggccatggatttggaacagaccttccataagctgatggaatcacgtggtgccggtctggacgatgatgcattggacgacaagctcggcgatgccgtggtgttccaaggtgtatcaaaataccctatgcgtatcaaatgtgccctgctaggctgggaagggctcaaggattccattgccaaggccctagccgccaagaactgaggaaacaatgaccaacgataatctggttcccgaaccgcagccttccgtcttcgacgctgtcaatggcgtactgcaagacgaagaggcagcgcgccgcgtaatggctaatccggctttggctaaaggcttccccaatggtcgcccggttgagcgcacatcagatgacgatacctgtgcctgcggcaatcatcacggcaagtgcggctgccaggatgacgagtccgatggcagcgacattccgattaaagcgattgatgacatcggccgcgccactgccgaggatgtgcgcgaggcgctgcatcaggtcatcgacccggaactgggcattgatgtaatcgatctgggcttggtctacggcattgaaatcgacgagcttggccgtgccatcatcacgatgacgctgaccacaccggcttgcccgctgaccgatctcatcgaggacgaatgcgcttccacgctggctggtctggttgaggagttccgtatcgactggacgtgggatccgcgttggaccatggagcgtattactcccgaaggccgcgatcagcttgccgcgctcggcttcaacttcgaaaacatgccgaagtactgagtttgatagttctgccccccctgaggggggctgtcagcgaagctgactgaggggagtcgactaccaatacgagaaaagccccgcattatgcggggcttttccatacctagaccgtcaatcagtcatcgacaatggtgttcttcggcacgaccgtgatgccgtccggcgtgaccgtgaaaccacgggccagatcgtgctcggtatcgatgccgacggtggagttctcggtgagcaccacgttcttgtcgagaatcgccttgtatacgcgggcacgacggttgatgaccacgccgtcgaacagcacggagtcaacaatctgggcccaggaatgaatgtgcacgttgggggagagcacggagtggtgcacttcaccgccggagacaatcacaccgggggagacgatcgagtcggtggcgtggcccaggcggtcacgaccggcatgaacgaacttggccggcggcaggttgccggacatcgtgtaaatcggccaatcctggttgtacaggttgaactcaggcacataggcaatcaaatccatgtgcgcatcgtagaactgcttgatagtacccacatcgcgccagtaggcgtgatcggtggcggtggagcccggaatctcgttcgagttgaagtcatagacaccggcttcgttacgggaagcgaagtatggcgcaatatcgccgcccatgtcgtgcttggtatcgggagccttctcatcgagcgccaatgcctcaaacagggccttggtgttggcaacgtagttgcccatggaagccagaatctggttggggttgtccggcagtcccgtggtggtggctggcttctcctggaagttcttgatcatgctcgggtggtccgggtcgacctcgatcacgccgaactggttcgattcctcgatgggctggcggataccggccaccgtgaactcggcaccggactcgatgtgctgctgcaccatctgctcgaagtccatgcggtacacgtgatcggcgcccacgatcaccacgatgtccggctggacatcctcgatgatgttgatggtctggtagatggcatcggcggagccgagataccaatgcttaccgagacgctgctgagcgggcacaggagagacgtaggagccaagcaacggcgagaaacgccaaacctgggagatatggcggtcaagcgaatgagacttgtactgggtgagcaccacgacctgacggtatccggaattaaccagattgctcaacgggaagtcgatcaaacgatatacgccgccgaaaggaacggcgggcttcgcgcgatcgcgggttaacggcatcagacgggtcccctcgccgcctgcaagcactatcgacagaatcttaggattcttggccatcgtaactgtcctctctgttaccgagcgtcttttgacaccgcactgcttgccggatgcttcattgcattcggtctacatagttaataattgcagaaaaaatcgaacacgcaaggctttcgctcccgcgtgccgtgaacttgcgatgaacagttatgggatttgctggtggtttggcgaatcgagccgataaaaaatgaagaaagctacctcgtggcatagaatgccactgcgctggatgcggctacgttgagactgtcgactccatggctcatgggaatcttaacggtcaggtcggcgcgagcgatggtgtggtgggacagcccatcgccttcggtgccgaaaatcaatgccagtttttcgatatgcgtcggatcttcggccggggcgtgcaggcgtctggtcagttcgtccagcgagatcgagcgatcctcaagtgccatcgccacagtggtgaagcccagcgacttcaattcgtcgatgccttggaatggccagtaatgtttgttctcggtgccgtcttcattgcgtccggtgatacgggtccaaggaatctgaaataccgtgcccatcgatacgcgggcggcgcggcggtagagcggatcaccgcaagagggcgtgaccagcacggcatccacatcgagcgcggccgcggaacgcatcagcgcacccacattggtgtgatccacaatattctccatcacagctacgcgacgagcatccttacagacctcggccacggagggtagcggccagcggcgcatggcgcacagagctccacgatgcaaacggtagccggtcagtcgtttgagctgttcgggagaggccacatagacggggatatcggcaccccagcggtcatcgatgaagtcgaaagtctccgtcatgccttccaaccaaggttcttcgaccaacaaagagagcggctcacggccggctgccagagcacggtcaatgaccttgggggattcggcgatgaacacgcctttggcgggctcgagccgattacgcagctgcatttcggtgaggctcacatatgcctcaacgcgcggatcgtcaacggtatccaacgtgatgaactgcatggtggcctttcgtgtgagcagataacgaaaaaccccttgcaatgcaaggggtttatctgtgcccgagacgggacttgaacccgtacgcccgttaaaaataggcactagcacctcaagctagcgcgtctaccattccgccacccgggcaggtgtcgttgagacaacgagagataagcttagcatcaaatcacaggtatgcaattcgggtgtgtgccgcgcgtgtcgcgtgtagcctagaaaccatgaccgatgccctttttctcttcaacccgcaggtcgatgacgtaccggtgaacagtgacgagctgcataccgggtggaaactgaccctccccgcccatatcaaacgccatgccgtgcaggccatgaggcttaaggcgggagacagcctccagctctccgatggtaggggactgcgtatccacgccgtgatggcggatcctgaagcgggtcttgccgaagtggtcaccgttggccgtgagcctgaaccgttgacacgtcttgcattgattcaggcgttggcaaagaccgggcatgatgaacaggccgttgatatggccacgcaaatcggcgtcgaccaagtggtgccatggcaggcggatcgatccatcgccaaatggaaggccgggcgcacggataagaagtggaacgcggtgctggacgccgctaccgagcaggcgaggcgcgcgtacaagccgcagctggaagcatgtgcaaacagcaaagaggtcgtagcgatatgccgcagggcatgcgtgcacggtgacttggtcatcgtgctgcatcaggatgccaccgatacctggactggtgtggaggccaaagtcgcacagctggtggaacgtacgttgtcggacggcaagccgcgcacggtaagcgtggtggtcggtccggaaggtggcatcagcgaacaggaagtggctgacttcaccaaggccggggcggtgagctgcgtgttgggcagcaatattctcagggcagccactgcagggcccgtggccctttcgctgctgtcacgcgcgcttggccggtatgagtagcggcgaatgcctctgcggacgctgtattggctgaaagccgattcatgcaatgcagagtaacgtccccgcgctaagctggtgcatagcaacacagtaaaccaaggagcatgatgagcgaatccgacgattgcctgttctgcaagatcatcgcagggcagattcccagcagcaaggtgtacgaggacgagacgacctacgcattcaacgacatcgatcccaaagccaaagtgcatgtgctggtagtgccgaagaagcattatgccaacgttgctgaacttgctgccgcagatccggccgagctggctcatatcgtttcggtcgcccaaggcattgccgatcatgaattccatggcgcgtaccgtttggtattcaacacaggtcttgatgcgggtcagaccgtgttccacgtgcatgcgcacgtgatgactggcgaaaagctcgacgagtagtaggagaatttccgcttcgtggcaacgactacacgcaccatcaccattccacctcagctcgatcccgtggccgtgcttggcccggttgacgaggttcttcgtgaggttgagcgcgctttccctgagctgacgattatcgtgcgaggcaaccgcgtggcaattgtctcgaggtctaagcagaccgaggctcaggcggcacaagccgaggatctggttaacaccattatccaagccgcttacaccgctcccatggacgccgataccgtgaggcgtatgctcgatcagaatgtgctgaaaaatcgcgttcgacttgagcaccccggtcatggaccggcacatgacaaattcgtgcaatcggccactgcggccgatcgtggccattcgcgtggctcgggcacgcatgacccgttgtaccgcaagccttcggttcccggtgtgatcacgtttgccgcaggtgtgccggttcgtgccaaaaccgctggccaagtggcctacgtcaatgcgattgaatcgcataccatcacttttggcattggccctgcaggtaccggtaagacctatctggccgtggcgaaagcagtgcgtgcttttcaggacaagcagattcgtcgcatcattctcacccgtccggccgtggaagccggcgaaaacctcggtttcctgcccggcacgctcaacgacaaggtcgacccatacctgcgaccgctctatgatgcgctcggcgatatgcttggagccgaccagctcaagcggtatatggatgacggcaccatcgaagtggctcctctggcgtatatgcgtggtcgtaccctgaacgatgcgttcgtgattctcgatgaggcgcaaaataccaccgaacagcagatgaagatgtttctgacccgattgggcttcaacaccacgatggtcatcaccggtgatatctcccaggttgatttggcggtgcctcgttcgggtctggccactattgagcggattctggagggcatcggagacatcgcatttgttcatctgggaaccgatgatgtggtgcgtcaccagcttgttggacagatcgtggccgcttacgatcactatgatgccatcgccggcgatcatcgcgacattgagcgcaggctgcgtggacgcaaacaccgtcaggaagcggataacggcaacgataagcaatccatgaatcgaagcgagacaaccgatgagcgttgatgtcactaatgaaacccagtgggtcatcgatcccaaggtgttctccgacctgggtatttgggtgcttgatcagatgcgtgtcagcacacaatccgatctgaccatcatgttcgtggaccccgatcccatcgccgaactgcatatgcgttggatgagtcttgaagggccgaccgacgtgatgagttttcccatggatgagctgcgccccggcgacggcaaaaccgtgatggaaggcgtgctcggcgacattgtcatctgcccgtgggtggccgcccaacaggccgccgcagccggtcatagcaccatgcaggaaatgctgctgctcaccatccacggtattttgcatctgcttggctatgaccatgtgactcctgaacaggaacgacagatgttcggactgcagcggcagttgctattgaccttttttgccctgctgggcgatgcaaacatgcaggccactcttccacctggcactcccgatgcgctggctctttacgatgccgcgcacggcaagggccgtgacctcgattccaggaaataaaacacaaggacaccagaaaccattatggagtattccagtaccaccttgatcgttattaccgtcatcctcgttgtggtggcggcactgttcgtctggttctcgttgaccatggccgctgcggaaggtgccgtggcacgcgtgacacgagccagcttgaacaacctcattcttgaggtacagactgactccgagtcgagccagttcatcaagatgaagagaatcgacaagattcatcgcgttcagcgtctcatcgccgaccggtatgccacggccggcagttgcgcgttcttccgcatcgcctgcaatgtgctcgatggtgtactcgtctcctcgattgcggctctatggggcgccgagctgtgggttggtctgctcgccggtttcctgttcgcgattatcgtggccgtggtctccgtactggtgcgcccgcgtaccgccggcatgaccaaaccggtcgacatcatgattgcccactcgcgcattgtggaccttggctgcaagctcacgccgttcgctcgcattggcggcgacaagtcttcagtcaaaggccctggtcgtcgttccaaggattccagcttgtccgatgacgaggagctggagaagattcagcttgaacagggcaaggccgcgattgatcgcttggtggaatccaacgatttcgatccggaagtctccgagatgctccgcaatgtgctcactttgtcggataccttgacccgcgaaatcatggtgcctcgtaccgacatgatttgcatggagcgggataccacgcttgcttctgctctgaaactgttctcccgctccggattctcccgcgttccggtgatcggagaggacgtggacgatctgattggtgtggcctatttgaaggatgcggtacgcgccacggccttcaacccggccgctatggaacgtgatgtggagtccatcgttcgccagccgatgctggtacctgaatccaagccggtggacgacttgttccatgagatgcagcgttcccgtcagcatgtggcagtggtggtcgacgaatatggcggcatcgccggcatggtcaccatcgaggatgccatcgaacagattgtcggtgagcttgaggatgagcacgaccgtacgcagcacaccgaaccggagaaaatcggtgagaacaagtggaagatgcctgcgcgaacgccgattgccgatttggaagagatctttgagatcgacattgatgaggacgacgtggataccgtgtacggtttgctgaccaagattcttggtcgtgtgccgattgtgggggcttccgctgtgacccgcggcctgcgtctgactgccgtggattcggccggacgccgtaagaaggtctccaccattgtggttgagccggcccacgtcgagggcatcaaggaagatggcaagaccaatgaagaaaccggcggtgagaccgctgagagcgatgaaaccgccgacaaggagtgatatggacgaccgaaacatctcaaacgatggcgatgccgccgctgccagcgagtcagtgagacaggaagtgccgtaccgctctggctttgtggctgtggtcggccgaccgaacgttggcaagtctacgctgattaatgctctgatcggcaagcagattgccatcgcctcctcccgaccggagaccacgcgtaaagccattcgcggcattctgaccactgataatgcacagcttgtactcgtggatacgccgggcattcaccgtccgcgcacgctgctcggccagcgtctgaacgatgtggtggaggagtcgctgtctgacgtggacgtggtggcgttcttgttgccggctgatcaggaaattggccctggtgataagcgtattttgtcccgtctgcgtaccgactttgccaccaagcgagaggacggctcattcgcgtggcgcatcccgctgatcgccatcgtcaccaagattgatgaactcggccgtcagcagctcatcaacaagcttatcgagatcaacgagttcgccgactttgcggacatcgtgccggtgagcgccctgaagcatgacaatctggccgaagtgcgcaacgtgctcatcgaccacacgcccgaggggccgcagatgtatccggacgaccagatcagcgaggagcgtcccgaggacaccatcgccgaactcgtgcgaggcgcgttcctggagacgttggatgacgagttgccgcattctctggccgtggtggtcgattccatcgactatccggaagacaacgagaccggtcagggctacgatggcaaggctcaggtcaatgtgtccatttatgtggagcgcgactcccagaagccgatcatcatcggcaagggcgcctcgaacctcacctacgtcaaaaagaagctgcgcaccccggtcaaccgcatcgtcggtcaaaaagccaagctcgacctccacgtcaaggtcgccaaaggctggcagtccgaccccaagcaactagaacgcctcggcttctaggaatcggccttcggccggttataacaaagggagattccaatggaatctcccttttgctgtactcaagccctgcttacttcttcttggtgtacatctgggtgttgaggagggtggagtagcgcttgatgaccttggggcggatgaccttcatggaggcggtcatcaggccgttctcctgtgtgaactcctcaggcaggatgatgaacttacgcacggattcggcgcgggaaacgccttcgttggcctgatcgatccacttctggacctcagcgcgtacggcggcgttctgagaggcgtcctccagagacatgttctcgtccaatcccttggcggccagccaaggacgcaaagactcctcgtccagcgtaatcagcgcggagatgaacggacgcttgtcgcccagcaccagtgcctgggacacgaactcgcaacgctgaatggcctcttcaatcggacccggcgccacattcttgccacctgcggtgatgatgagatccttcttgcggccggtaatgtacaggaagccatcgttgtcgatacggcctaaatctccggtggcataccagccatcttcggtgaacgacagctcggtggcctcatcgttcttgtgataacgcgggaacacggcgcgacccttgacctggatctcgccgtcctcggcaatacgcagcgagaagccggggaacgcgacgcccacggacccggcgtggaacggggttcccagcgggttgaacgcgcatggtgcggtggtttcggtcagaccatagccctcgtagacgggcacgcttgcgccgcggaagaacgcaagcagttcaggatcaagcggcgcgccgccggccacaatccacttcatgcgtccacccagcacctcacgcagtgaggagtagacaatcggatcgaaggccgcgcggcgggcacgggtcaatgcactggccttgccgttggcggagatttccttcatgtagttctgggcagccaccacggcggaggcgaacaccacgcccttggggccatggccggccttctgggaggcggcgttgtacaccttctccagcacacgcggcaccacaatcatgatggacggcttagccacctgcaaatcactaatcagcgtcttgatgccggcggcgatgtagatatgcatattcgaggccacgacgatgtaattgatggcgcgggcaaaggagtgggcctgcggcaggaacagcaggatggtgttcttcttgttgtgcagcagctcgggcatgtagtccggcaggttcagcgcggtctggcagtagtgctcgtgggtcatctccacgcccttcggcgcggcggtggaaccagaggtgtacacaatggagcacagatcggttttcttgaccgaatcaatgcgcttatccagttcctcgtccgagatgccggcaccataggccttgatctcatcaagagcgccggtctcgatgcataggatgcgctcgagtgaggggcattcctccacggcgccttccgccttctctcgcatggcggaatcctgcacgatgagcagacgcgcgtcagaattgttgacgatattgcggatctgttcggccgagtcggtgtcgtagatggtggccagcacgccgccgcaggccatgatggccgcatcggtcagatcccagtcataggaggtgcggcacatgaacgccacgccgtcgcccttcttgatgccgtagtgcagcaggcccttggccacggcacgcacttcggcgaggaactcattggcggtgacggtcacccattcgttgtcggacttgtaggtatacagcggttcgtcacccatgcgcttggcgcgatccgcatacaggtcgtagatggacgtgccgtcgtccagaggcggattgccggcagtggacgtggtgagcagtccggtttccgggtcgatgtcggtgacggtcagatggccgtcatcccaatcgtcgctgtgcggcagttcgatgttggcttcctgcggcacatcggcattggacagataatcgggctcgtccggagtgtcgtcgtgaaccgggtgaacgaagtcggatcccaacctgagtgccttgcgggtcagattgatggtgtgctgcgtaaaggaattgataaccgacaactcttgctcctgtaaacctttcagtgccgttcgagcataagccgaacgctctcaaaccttagattgtaatcgttcacatcgaactcgtcaccttacgcaaccgtaggaaaagcctacgcaaccgtaggttttgggaggttctatgtggtggatggacactggcactctgattgttgggtaacagactgtcgatagtggttggagatcgttcgactactgcctagatgtcatccaatcgagttgacgcagtagggatgcgaagatgaaaaatgcgggtcttttgccccggttgttccgcctaacgagtcaaatcgcccgtatccttcactcttcggctacaattgcgcctcggataaccatgtccattcaaagtagaacaagaaagggctctcatggcgcaaaacccagaagccaccgtggtgttcggcgttttgaatgaaacgtctgaaacggaatcccgcgtcgcgttgacgccggatatcgtcacccggctgaagaggagtggagtctcctcgattattgagaccggtgccggcattgccgccgaatacaccgatgaggattacgaaaaggccggcgcaaaggtgaccagccgtgacgaagtgctcgctcaagccgacgcgctcggtttcgtggaccgtccgtccaccgatatcgtgagcaagctcaaggcaggccagtgggtgattggtatgctcggttcctttaccgacgccgattacgtggccgcactcgagcaggccggtctggttggtatcgccatcgagaagctgccccgcaagctttccagcgcccagtccatggatgagatgacctcgcagaactccgtcatgggatacaaggccgctatcaccgccgccgatgcctatggcgcattcctgccgatgatgaccactgctgccggcacgattcgcccggccaaggctctggtgctcggtgcaggtatcgccggtctgcaggccatcggtacattgaagcgccttggtgcggtcgtcactgcatacgacgtgcgtcccgcttctcaaggtgaggtcgaatccctgggcgccaagttccttgatctgggacttgacttttccaagggccaggacgagggtggttacgctcgtgcgctgacccccgaagagcaggcccagcagcaggcggctgtcgatgagaaggccgctggcttcgacatcatcatcaccaccgccaaggttccgggccgcaagcctccggtgctgctcactgcggccggtgtcaacggcctcaagcgcggtgccgtgattgtggactgcgccgcttctgatcttggtggcaacgtcgaggggtccgccgtaggcgaacaggtcaccgagggtggcgtcaagctgattggcgccccgtacctggcctccggtgtggccaccaccgcgtccaacctgctttcacgtaacgtggctgacatactcgtgcacttcgtgcgtgacggcaagctcggccaggatcttaccgaagagctcgacgacgcactggtggtcgccggtcgcgcaggggctccggctgctgccgccgagtccgagcagtccgagaagtaaggaagaaggaatattatgcctactctcgttgtttccattaccctgttcgtcctcgcgctgcttatcggtatcgaggtcatcggcaaggtgcccgccaccctgcacacgccattgatgtccggcgcaaactccatccacggcatcgtcattgtcggcgtggtgattgtggccgccgaggccaacaccccgctggcttacgtgttcatcttcctggccgcagtgctcggcaccatgaacgtcgtcggcggttatgtggtcactgaccgcatgctcgagatgttcaagtccagcaagaacgagaagaagggggagtcgaagtaatgacctccgcaaccgttggagccatcgacatcgtcgcatggttcgtctacctgttctccgccgtcctgttcgtggtcggtctgcatttcatgaactcgccgaagaccgcccgaaagggtaaccaaatctccgcgttcggcatggtcgtggccgtgctcatggcattcatcgtgctctttgccaagggcttcgtgaacgtcgtggccgtggtggtgctggtcgtcggcatcctgatcggtgccgtggccggtgtcgtctctgccaagaaggtgaagatgaccgacatgccgcagctggtctccgtgttcaacaccgtgggtggtggcgccgccgcgctcgtggccctgaacgacatcctgaccaaggaaggcactccggacatcgtggtgcttatcaccgctggcctaggcattctcatcggctccgtgaccttcaccggctcgctgatcgcagccggcaagctgcagggcatcaagtgggtcaagaagctcaccatgccgggcaagggcgtgtggaacatcctgttcatcgtgctgaccatcgtcagctttgtcatgctgtgcgtccagcccgagcagcgactgctctggtcgatcctgaccaccgtgttcgccctgtgctacggcctggtcttcgtgatcccgatcggcggcgccgacatgcccgtcgtcatctccgtgctcaacgcctgcaccggtacggccgtggccatgtccggtctggcgattgacaatgtcgccctgatcgtggccggcgcgctcgtcggttccgccggtgtgaccctatccattctcatggctcaggccatgaaccgtccgctgctgtccgtgctggccggtggctttggtggcggctccgatgccgccgctgctggcgacggtccggaaggcaccatgaaggaaaccactgccgacgatctggctgttcagcttgtttacgcgcagaaggtcatcttcgtacccggcttcggcttggctcaggcccaggcccagcgcgagctcgccgacctcggcgaactgctcaagggccacggcgtggaagtctcctacgccattcacccggtcgcaggccgtatgcccggccacatgaacgtgctgctggctgaagccaacgtgccttacgaagagctcgtggatctcgatgagattaacccgcagttcccgcaggccaacgtggccttggttgtgggcgccaacgatgtgaccaacccggctgcccgtcgccctggcaccccggtttccggtatgccgattctcgacgttgacaagtcccagaacgtcgtggtcatgaagcgtggccgtggtatgggctatgccggcatccagaacgagctgtacttcgaaggcaacacgcagatgttgttcggcgacgccaaggccagtctgcaggccgtgatcgctgcggtcaaggagcttatcagctgatggtgccgcgacgttcgcgcattgccgcatgagaatatgagtgggggtgtgccttcacaagaaggcacacccccactcatttcaatgggcggtcgcataaagccggtcagttcgattgagcggcggcgcgcttgcccttcgtgccgagcaccacggcgatgatggacgcgagagcgatggcgtacagcacggtgatgatcgggatcagcgcgctgtagcggtgggccgcgtccgccgtatgggagacgacgaaggacgccagctggttgccggacaatccggcgaacgcccacgcactcagagccagcccgtgcacggtcgacaccgacttcatgccgaagtgctgctcaagcagcaccggcagcgtggagaatccgccgccgtatccggcgttgacgaggaacagcatcgtcacgatcagccacagggtgccgttgtcgatcgaatgcgtgaagatctgcagcgcgcacaccgcgatggacatgatgaagatcaccagatatgcggtctcacggcgcttgcagtggtcggacagcgtggagaacccgacacgtccggccgcgttgaacacggcgtcgacggccaggacgacgctgatgcttcccgcgatggccgtggccagctgggccgcgttcagcgatgcgtacttcggaagaatggacagcgcatcatgcaggatgtccttctcctgggagatcaatgccagaccgcaggtgatgttgaggtagaaggccagccagatcgcccagaacaccggcttcttcatgatgtcgcgacgacggatgcgggtctcagcggagtacacgtatccggcggggcgcttgatcagcgtgaatcccagcagcatcatcaccgcatagacggctgcgaggatgtagaacatgggcgccagtccgacggtggagatcagccactgcatgaccgggcttgcgatggccttggccagaccgaatcccgcgacggcgatgccggtggcgagacccttattgtcggcgaaccacagcatcaggttcttcaccggcgtcagataaccgacgccgagtccgatgcccatgatcacgccatagaagatgaacacgccggggagccatcccgccgcgatgctgactccggtgccggcgaatccgcagacgaagcagaccgtcgagatcagggccgatttcttgatgtccttttcgacgaagggtccaaggaaggcggccgacatgccaaggaagaagatggcaagcgagaagccccattcgacgatgcctggcgccacgtgcatctgatcggcgatcagttgtttgaacacgctccagcagtatacggtgccgattgagatgtgaatgagcaacgccggaataacggcgcgcacccagcggttttccccatgctgttgattgaccatgtactattcgttcctctcttgttgtgttcgccctgcggcgaacaagcaacaacgtagttgggagagtggcccgcctcgatatgcgtggacggtggcggaggggggcttgtgcaacgttggtatcactgggttttttggaaaatgaacatcgttgatgttcgctccgggagtaatcatgaggaaaatctcatgtgagtatcgtcacggttctcacggggcgcgtcgggccatcgccgccattgtccggcgcgtgcgtataattcatcaatgttgtcttggcgagggaggcgcatgcttccgtaatcgactcggcgtgtggttcgcaaacccccttggggttttcttcacggctcgttgatgcgccgaaacaccatgaacgaaacactcaaggagatatatatggctaccaccattaagctcgaaggcgaagtccgcaacgagttcggcaaaggcgttgcccgccgtctgcgcgttgccaacaagatcccggccaccatttacgccggtggcgccgacccggccttcgtgaccctgccgatgcgtgagaccaccctggctctgcgccacaccaacgccctgttcaccatcgagttcggcggcgagtccaagatggccgttgtcaaggacgtgcagaagaacccggtcaagcgcatcatcgagcacatcgacttcttcgaggtcaaggccggcgagaagatcgacgttgaggtgccggtgttcgttgagggcaccccgaagggtgctgcagtggcattcgtcgacattcaggagctcaaggttcgcgccgacgtctccaacctgcccgagaagatcgtggtcaacgtcgagggcctgaccgacggcaccaaggtcttcgccaaggacatcgagctgccggaaggcgccgagctggacgtcgagcacgccgaggaatccgtcgtcaccatcgaggttccggaggacgccaccgagttcacctctgctccggaagctgctgctccggctgacgccgatgccgctgctcctgccgccgacgctgacgccaagtgatgaaaccggtcgtcttcatggcggccgatctgaatcataattgcaacagaggaacccgtaaccgtggaaacggtacgggttcctctgttttcaccatgtgaactctgccacacgagcaacacatgggtgtgtaaaagtatgcaacagagctcgcgccacaagcgcacagcacataccccatctggtggccttcgggccgccaaagtcaagaagaagtagccaaatgactgaaaacacgcaccacgatccggcagcgctcgataagctcaccgaaccgttcaccgtactgccgaacgacaaccccgcatccgatgagaagcgtcagtccctcatcgacaagccggctttcggccaggtgttctccgacaacatgacccacatgacctggaccaagggcgaaggttggtccgaccgccgcgtcgaaccgtacgcaccgctcaagatggatccgggtgcttccgtgctgcactacgcacaggagtgcttcgagggcctcaaggcttaccgtcatgccgacggctccacctggctgttccgcccggatgcgaacgccgagcgtttccagaactccgccaagcgtctgtacctgcctgagctgccgattgacgacttcctcggttccgtggccgcgctggtcaagcgcgatgccaactgggtgccgtcccgccgcgagtacacgctgtacatgcgtccattcatgttcgcttccgagcctttcctcggcgtgcgcgctccgcaggaagtcgactactgcgtgatcgcttccccgtccggcccgtacttcccgggcggcgtcaagcccgtgagcatctgggtcgaagacaagtggttccgtaccggccctggcggcactggtttcgccaagtgcggtggcaactacgccgcctccctgctcggtgagtataagggtatcgagaacggctgcgagcaggtctgcttcgtggacgccgccaccaagacctacctcgaagagctcggcggcatgaacatgatggccgtgcacaaggatggccacgtggagaccccgtccctgaccggtaacattctgccgggtgtgacccgtcgctccctgattcagctgctgcaggacaagggccacgacgtagtcgagactatgatcgccctcgaccagctgctcgaggacatcaagtccggcgaagtcaccgaggtgttcgcttgtggtaccgccgccatcatcaccccgatcggtcgcttcaagtccgagaagttcgatgtcaccgtcgccgacggcggctccggcgagctgaccgttgccctgcgcgacgaactgctcggcatccagcttggtgaggtcgaagacccgcacaactggatgtggaaggtatgctgaactagcaccttttgtttctgactaagaccccttggaacagcaacaattccaaggggtcttggcgtatctagaatattctgtatctggagagattcagatgagtgaagcaatatttcgcaacaaataatatgatttaggtttctgtgcgttgcggaggcttgttctggtgcgtccagatgagaaaaggagcaaaaagctatgagtaagatcagtgacgagacagcgctgcgcaaccgcttgcgtgatatcgaagaaaaagttgccttgatcgaatcagaaatcaacaacggttaagtcgtgattggcttttgattttgattaattcacctagcggtgcctttctgccaaagactggcatgttagcaccgctatacatgcctcaatggtgctaacttgtcagtgcttggcagtttggcattattgcgaacctctcagtggcgtcatgttgccagtgcttggcaggttggcttcattcctaggctcgttcatgattcattctcgggctttttcttccttatcctgtctcgggcaaggcttggggtaggctcgggcacggcggacggcagcgccgaatgaggataaaagagaacagaacgaagacggactgagacgaaccgaagtggtacaagaggggagcggctcatgcaggtggcgttggagaacaacatcgtttttgtggtcatcgactacctcgctattttgtgttggggactgtccggcggacttgccgccattcgcaagggctatgacatcttcaccattatgctgtgcggctggctgactgcactcggcggaggtctcgtgcgcgatgtgatgctcggtgctctgcctccggtcggcatcaccgataaagggtatgtactcaccacgctgttctctggcgtcatcgcggtggtggctcatccggaaatcaccaaactcaaatggacgatgactgtcatcgatgccttgggcctcggtctgttcgcggtcaacggcactgccaaggcactggcctacggatcttcaggcatgactgccgtattcctcggcatgttcaccgctctcgccggtggccttattcgagatctcttcatcggtgacgtaccgatgattattcgtgataagcatctctatgccgtaccttcgttcatcggctgcattctgaccgtactggtatggcgtggcgtgagatacgactggtttgatatgcgctcggaaatgctgcttgatgtgctgattgtcatcattgtggtggcattgcgactgctttcggtcggtttcaatgtcaccttgcccggtgccatcgaacggcgacatgtgtatttgcctagcgaaaatcggcatattcagcaatcaggtggccgaggtaacgctaataccgtggatgatgaggatacgcctcaggatggttcaaggctatctcagggctaactgccttcaaagaggtatatttggccctctgcagaatgctaactgctttcaaagaggtgtctaaagcacgaaacgttgagtataagtgttgcaatgacggtgtttatacttgggttttccgtattcggtacctctttgaacggagatatcatttcgcaagaatgtcaatgtacctctttgaacggagatacaaaaagtcccgcaaatcacatgacttgcgggaccttctaaaacctcaagaggtttatgctcacagagcgttgatcgcaacagcgaggccggacttgcggttggcggcctggttcttgtggatcacgccagcgccagcagccttgtcgagcttctgggcggcaaccttgtaggcggcctcggcggcagccttgtcaccggcggcgatggcttcgcgggtggcgcggatggcggtcttcaggccggtcttcacagccacgttgcgaaggtgcgccttctcattggtgagcacgcgcttcttctgcgacttaatgtttgccacgtttactccaaacgatgtgtgttataaggacatacaaatagaagaggatagcatgtgccccggaaaaacccgtgcaatgccacgccgaatacagtccctcggctacactaggtgaagtttgagtatatgccaagaggaggaatgcgttggtcgtccaacacaatcagccgggttccaccgatcagtcggtgattcgcaacttctgtattattgcgcacatcgatcacggcaagtccaccgtggccgaccgcatcctgcagctgagcggcatcgtgcctgagcgtgagatgcgcgaccgcttccttgaccgtatggatatcgagcaggagcgcggcatcaccatcaaatcccaggccgtacgcgtgccgtggaccttcgatggcaccgaatacacgctcggcatgattgacacccccggtcacgtggacttcacctacgaggtgtcccgtgcgttggccgcgtgcgagggtgcggtgctgctcgtcgatgcgacccagggcatcgaggcgcagaccctgtccaacctgtacatggccatcgaccatgatttggccatcatccccgtgctcaacaaaatcgatttgccgtccgccgaaccggacaagcacgccgaggaaatcgccggcctgatcggttgcgagccaagcgacgtgctgcgcgtctctggcaagacaggcgaaggcgtggccgatttacttgaccagatcgtcatggatgtgcctgctccgcacggcgatcccgaagcgcccgcccgcgcgcttatctttgattccgtctacgactcctaccgtggcatcgtcacctatattcgtatggaagacggcgaactgcgcgaccgtgaaaaagtgcacatgatgggcatcggcatgacccacgatccgatcgaaatcggcgtgatcagccccgacatgacccgtaccaaggcacttggcgccggtgaagtcggctacatcattactggcgcaaaggatgtgagccagtccaaggtgggcgacaccctgacctcggccgtccgcccggccgccgagccgctgcccggctaccgcgaccccaagccgatggtctatgccggcttgttcccgatcgacaacgcccagttccccgaactgcgcgacgcgctcgacaagctcaagctcaacgacgccgccctgatctacacgccggaaacctccgtggcgctgggcttcggcttccgctgcggcttcctgggtctgttgcacatggaaatcgtcaacgaacgactgtcacgcgaattcggcctcgaccttatccagaccgctccgaacgtcacctacgacgtgaccgccgaggatggtagcgaacaccacgtgactaacccgagcgagttcccggacggcaagatcaagaagatcgtcgagccgatggttgccgccgacatcatcacgccgaaggaattcattggcgcggtgatggatctgtgccaggaccatcgcggcattatgggcacgatggagtacatttccaccgagcgcgtggaaatgcattaccgcattccgctggctgaaatcgtgttcgatttcttcgatcagctgaagtcccgtaccaaaggctacgcctcccttgattatcatgaggacggcgagcagtccgccgacctggtcaaggtggacattctcatccagggtgagaaggtggacgcattcagcgccatcgtgcaccgcgacaaggcctacagctacggcgtgatgatgaccaagaagctgcgtggcctgattccgcgtcagcagttcgagattccaattcaggccgcaatcagttcgcgcatcatcgcccgcgagaacattcgcgccctgcgcaaggacgtgctcgccaagtgctacggcggcgatatcacccgtaagcgcaagctgctcgaaaagcagaaggccggtaagaagcgcatgaagatgctcggccatgtggaggtgccgcaggaggcgttcatcgcagccctgtccaccggcgaggactccaacgaccgtgacaccaaagacaagatccgtgccgctcagaagaccgagggctagtgttcgaggtctacatccacgtcccgttctgcttgcggcgctgcggttactgcgacttcaacacctacacggctacggatcttggtgcgggggcctcgcgcggcaactatgccaatatggtcattcgggaaatgaaattgaccaagcagtggcagctcgatcacggcatcgcggagccgccggtttctaccgtattcttcgggggtggtacacccacgattcttgccgctcgtgacttggtagccatgctggatgctatccgcaagacttggggtatcgcgtccaacgcggaaatcactaccgaagccaatccggacaccgttaacgagtattacatcaatgagctcgcagccggcggcttcacccgtgtttccttcggtatgcagtccgccgtaccacatgtgctcaagactctcgaccgcacacatacgccggccaatgtggccgcaggcgtcaatgcggcgaacaaggctgggctgcgctcaagcgtggatttgatttacggcgctccgggggagagccttgacgattggcgtacctcggttacgaccgccatcgatcttggtgtgaaccacatctccgcctacgcgctgaccgtggagccgaccacgaaaatgggccgtcagattgccgccggcacgttgcccaaacccaatgacgatgacgaggccgctaaatacgagatcgctgacgacctgttcgccgccgccggcctcgaatggtatgaggtctccaactgggcccgccccggatacgaaagccagcacaacctaggctactggcgcaatgtcgactgggctggcgtagggccgggtgctcattctcattacaacaatgtgactgagattgaccgcccccagtcagctttgctgacagtccccgccagcgggggcacaaccgaggccatcgcccccgctggcgggggctgtccggcggaagccggactgggggtggttcccgtctcccacggcctgcgcagctgggatattgcgcacccgcgactgtggggaactgccatcaacgagcatcgcataccgtgggccgatagcgaggcaatcactgcggaggagaacctcgaagagctcatcatgcttggcctgcgtttgcgcgaaggtcttgacctcggccgcatcaatcaggccatcgcagccaacgagaacacttcatggcagaccattgccgtcgattcgcttcgaccgatggttgacgaaggtctgatcgccatgtccggcaatcgtgtcatccctacccgccgagggcgcctgctcaatgattcggttatcgaacggttcttcggccttgccggcatctgaccggctcgtcctcgattgcagtggaatcaggggagaatcacggatgccactgccagcgccatggcttgcctctgattacagtggcatcaattgtcggatgtctttttcatagcgggagatttcttgcttaccgactcatagggcggagtcggcgtaacgaaatgaagatgccggttggagaaattcacaattactaagaaatagaaaagtatatatatggacaccgttgtccggttatcgttcagttattgcgatattcaattatcgaattggcgaattgacgccgggggattgacgctcattaataacgtgcaatctcatatggaacgctgtgctgaagtgattcagcgagcgtcctcgtcgtcacccttcatgaggtcaacgaacaccttggagctggcgtgaccgcactggctcatggagctcagaccgtacatagcgaaaccgcgaatcatggaatccttgaaggacatggctgtttcctttcattggtcaaagccttgcagctttgatttatttctttggcttctttctgaaaccggtttcagaataacgcatatcaatgacgaatgcaagagatacggccaaccttcggtgtttctcgctggttccgcgcatgctacggagtcaacacccgttgtcttgcgtgtacatttgtatgagaagcgtaacgactgagacgagtcggcgaacaatgggggctcgaaaacaatggcgagaagtacgggacgcactcgtccggtaatcaaagacgtggccaagctggctggagtttcagctcccacggtgtctcgttatctcaatggcacggtcaatgtgaccgaggacaggcgtgcgcgcatcgccaaagccatcaaggaactgggctatgaacccagcatcgtggcccgtgccttgtcgaaccgggaaatggattcggtagtggtattcgctgccaatcccgccgccttttccacctccgaaacgaatcatggcgttgaggccgccgcccgcaaacgtcgattcctgctcaacatcgtgtccctggatgaatccgacatggaatccgtcgaggcacgtgtgcgcatgggtctgtcgatcagaccggctggagtggttgtttacgaatacgatcaggccggtatcgcggcacttgactatattcccaaggatatgccgaaggtcgtggtcggtggcagtttcggcgacggcgactaccagatcatcaacgccgaacgagatggtggtcgttggatgaccatgcacctgttggatctcggccacaaaaccgtcttctacgttggacgggtgcaaggagctactgacaacacccgtgccaatggatggaaagatgcgttggaggagcgggggattgaggctcccgaacccattgttgtatccgacggcaatctggagaaggccgtcaaggcagggcatgaactcggccgtcgtggcgaggcgaccgcgatttttgccgacagtgacgaaaccgcgatcgctgtgattcgtggtttgcgagaaaccggtcgacgtgtgccggatgatgtcagcgtggtcggattcgacgatcgtaatttcggtgccctatgggaaccctctctgaccagctatacccagaatttcttggacatgggggagcggtcattccgcatgctgtttgagcagattcaggccaagcgtatgggtgccgagatgcctccatcgcaaatcgaagtggtgcagggaaagccttgtcttcgcgcttccgaacgcgaattcacgggagtcgcttcattctgatcagtcgcctcgtgctgctgtgctgagaaatttccggttgaaccgcgtggtattacttgaaaccgaatgtgattgtgtgtgacgttctcaagtggctcatgatgcgtcttggcctcaatcatattaatcatgcggtcgataactaccggtttcatcgccatgttcctcatggccggtctgcacatgatgatgtagcccaatggcgattgccccgccggtttgctcgacatccattgagcgaactgttgattgccgttcacaatacggacgtttctgtgtcgaattttttgtggtctagtagacattgcgagctaaaacgcccgaaacaccccataattggctataacagattgcttgagaatcactattgacttttatggcgactcggtatatggacacgcgaaacgtaaatgacatgacgcaacggtactgtgtcaacagcaatgaacgaagaggcacgattcccttacgtgcccacaagcaattgaggtgatttcggtgacattcaaagccccgctcgatctcacggtccacgctccggacggtatgtatgacccctccaatgagcatgacgcctgtggtgtgggtatggtcaccactttgaacaagcgccccgagcgcaagatcgtcaccgacgccatcgaggtgctggtcaacctcgatcaccgtggtgccgtcggcgccgaggagaacaccggtgatggcgcaggcatcctgatgagcatgccggatgagttcatgcgtgccactgtgcccgccgaactgccggaagccggtcactatgccgcaggcatcgctttccttgaccgcgatatcgaaacctccggtcagcaggaacaggccatcgccaaaatcgtgcgcgaggaaggccttgaagttctcgcctggcgagtagtgcccaccaacccggacggccttggcctgcaggcccttgccgccatgccgggattcaagactctcgtggtcgcctctccggacggtgctctggccggcgtggacttggatcgcaagaccttccgcatccgcaagcgcgtcgagcatgaggtaggcgtctacttcgcttccctgtccgcccgtaccatcacgtacaagggcatgctcaccaccatgcagctcactcacttcttcgaggatctgaacgacgagcgcatgaaggccaccatcgccatcgtccactcccgcttctccaccaacacgttcccgagctggccgctggctcagccgttccgcctgctggcccacaacggtgagatcaacactatccagggcaaccgcaactggctctccgcccgtgaaggtcgcctgagcagcgaattgctcggcgagttcgagccgctgctgcccatcaccaccccgggctactccgattccggcaccttcgacgagtgtctcgaactgctgcatctcgccggccgttccctgccgcatgccatctgcatgatgctgccgccggcgtgggagaagaaccccgacctcgacccggacgtgcgcgccttctacgagtacaacaatacgctgattgagccttgggacggcccggccgacatcgtcttcaccgacggcactcaggtgggtgcactgcttgaccgtaacggcttccgccccggccgctggcagctcaccgacgacggctacatcgtgctggcctccgaggccggcgtgattccggaaatcgagcaggaacacatcgtgtccaagggccgtcttgagcccggtaagatgttcctagtcgacaccgccgaaggccgcatcattcccgatgaggagatcaagaagaccctcgcctcccagcacccgtaccgcaagtgggtggaaggcaactcggtcgagatgagcgacctgccccgccgcgagcacgtgagccactccggacagtccgtccagcgccgtcagcgcgccttcggctacaccgaagaggatctgaagctgctgctcaccccgatggccaacaccggtaaggaaccgctcggttccatgggtaacgacaccccgatgccggccttgtccagccgcagccgcatgctgttcgactacttcacccagaagttcgcgcaggtcaccaacccgccgctggattgggagcgtgaggaaatcgtcacctcgcttgaatccgccatcggccctgaaccgaacctgctgtccgattccgaactgcacgccaagaagattctgattccgctgcccgtggtcaactctgatgagatggcccagctcaagcgacttgacaaggcccgtatcctcggcggctactaccgtccgtacgtggtcaagggcctgtaccaggtcgccggcggcggcaaggccctccaggagcgtcttgacgagatcttcgccgaaatcgacgaggccattgataacggcaagaacttcatcgtcctgtccgatcgtgaatccaaccacacttggggcccgattccgtccctgctgctgacctccgccgtgcagcaccacctgttgcgccgccacacccgtacgcagatctccatggccgtcgaggccggcgacgtgcgcgagattcaccatgtcgcgctgctcatcgcctacggtgccgcctgcgtgaacccgtacctggcattcgaatccgtggaagacctggcccgcaacggctacctcaaggtcgacgcggacaccgccgtcaagaacctcaccaaggccctgtccaccggcgtgctcaagatcatgtccaagatgggcgtctccaccatcatgagctaccgtggcgcacagctgttcgaagccgtgggcctgagcaaggaagtcatcgacgaatacttcaccggcaccacctcccgtgtgggtggcgtgggccttgacgagatcgccgaagaagtggccattcgtcaccgcgtggcctacccgaaccagtggagcgcatccccgcaccgcaacctgcgcactggcggcgactacaagtggcgtcgtaccggcgaggaccacctgaacgatcccgaggccatcttcctgctccagcagtcgacccaccgtggcgactaccagatgttcaagaagtattcgcaccacatcaacgacacgtcgaaccgactcatgaccctgcgcggcctgatgaagttcaacaacaaccgcaagcccatcgacatctccgaagtcgagccggccaccgaaatcgtcaagcgcttctccaccggtgccatgagctacggttccatctcgcaggaagcccacgagacgctcgccatcgccatgaactcgattggcgcacgctccaactccggcgagggcggcgaatccgacgaccgtatcaacgattcgcagcgttacagccgcatcaagcagatcgcatccgcacgtttcggcgtcacctctgattacctggtacacgccaccgatttgcagatcaagctcgcccagggcgccaagcctggtgagggcggccacctacctggagccaaggttccgccgtggattgccaaggttcgccacgccaccccgggcgtggaactcatctccccgccaccgcaccacgacatctactccatcgaggatctgaagcagctgatcaacgatgcgaagatggccaacccgaaggcacgtatccacgtcaagctcgtttccgagttcggcgtcggcaccatcgccgcaggtgtggccaagtgccatgccgacgtggtgcttatctccggctatgacggcggtacgggtgcagccccgctcaacgccatcaagcacgccggcaccccgtgggagatcggcctgtccgaaacccagcagacgctaatcctgaacggtctgcgctcccgcatcgtcgtccagtgcgacggcgagctcaagaccggtcgtgacgtggtcatcgccgccctgcttggtgccgaggaattcggcttcgctaccgcagccctgatcgtggaaggctgcgtcatgatgcgcgcctgccagaagaacacctgcccgcagggcattgccacccaggatcctgagctgcgcgctcgtttccgtggcaagcctgagcatgtggtcaacttcttcatgttcatcgctgaggaagtgcgcgagattctcgcccagctcggcttcaggactcttgaggaggccatcggccacgttgagtgcctggatcaggacgaggccatcaagcgctggaagtccggcggcatcgacctgaccaacgtgctcaagcaggctggtccggtacccggcacgatcctgcaccagaccatcgagcagaaccacgagctggagaaggcgctggacaacaagctcatcgaacttgcccagccggccctcgaacacaaggagcccgtgcgcatcgaaatgccgattcgcaacgtcaaccgtacggtcggcaccatggtcggctacgagatcacccgccgctacggcgaggaaggtctgccggacgacaccatcgacatgaccctgcacggttccggaggccagtccatcggtgcgttcatcccgcgcggcgagaccatgcgcatctacggcgaagtcaacgactacgccggcaagggcctgtccggcggtcgcatgatcgtgcgcccggaagatagcgtcacctttgataagcatgacaacgtcattgcaggcaacgtcaccggtttcggtgccacctccggccagatgttcgtggcaggtcgtgcaggcgaacgcttcgccgtgcgtaactccggtgccacattcgtggtggaaggcgtgggcgaccacggctgcgaatacatgactggcggcaccgtagtagtgctcggcccaaccggccgcaacttcggcgcaggcttctccggtggcaacacctacgtgcttgacctcgacatgaagaaggtcaacccgggcgccatcaagtccggcagcctcctgttcaaatcgctgaacgccgaaaccgccaagctggtacacgatctcgtaaagcagcacgcagaagagaccggctcccagttcgcagcagccctgcttgaggactggaatgaaacggtcaagcgcttcactcatgtggtgccgaagcagtacttggccatgaccaaggctatggaagaagccaaggccaacaacatcgatttcaattcgcccggagcctgggaagaggtttacgagcacgtcacggaaggagtgcgctgacatgggcgacccaagaggattcctgaaagtccgtacccgccgcgagctggctgaacgccccatcgaggaacgtatcaaggactggttcgacgtgcacgccgaatccggtctgcagccgtggacccgcgaacaggccgcacgttgcatggattgcggcaccccgttctgtatgaccggctgcccgctcggcaatgtgattcctgaatggaatgatctggtccgccagggcaagtgggaggacgcttacaaccgtctttctcagacctccaacttcccggagttcaccggccgtatctgcccggcactgtgtgagcaggcttgcgtgcttggcattcaccagccgccgaccatgattaagaatgatgaggtcaccatcatcgatcaggcatgggagctcggctatgtcaagcctctaccgccgcagcgcctgaccgatcagaccgtggccgtagtcggctccggccctgcgggtcttgctgtggcacagcagctgacccgcgccggccacaccgtggttgtctacgaaaaggatgatgctctcggtggcctgatgcgttacggcattccgaactttaagctcgaaaagggtctgattgaccgccgtatcgagcagatggaagccgaaggcacccgcttccgcaccaacgtggaaatcggcaaggacatctcttgggatgagctgcgcgatcgttacgatgctgtggttgtggctattggctcccgcgtgcctcgcgatatgaagattccgggccgcgagctcgatggcatccactttgctctcgacttcctgccagatgctactcgccgcgtcttcggcgtcaagcctgtcaacgacatcaccgcaaaggacaagcatgcggtggtcatcggcggtggcgacacaggctctgactgccttggtacttccatccgtcagggtgccaagtccgtcaccgtgctgcagatcatgccgaaggaaccgacctcccgtccggataatcagccgtggcctaccttcgctcgtctctaccagaagaccacgtcgatggccgaaggcggcgaatatctgtacaacaccgattccgtgaacttcgtcggttctgaagaggaacagtccaaggtcaccattgaggactccgctactgcggaaggcttcgtggctgatgagcgtggccatgtgaccggcttgaagattgtgaacgtggctcccggcgagaacggaccgttcacccgccagcccggcaccgagcgcgtgattccggccgatctggtgcttatctctgtgggcttcctgcacccggataccaccacgctggtcgaccagctgccggtcgagctcgacaagcgcggcaacatcgcccgcaacgataacttcgccacttctcaggatggcgtgttcgtttgcggtgatgccggccgtggccagagcctcgtggtctgggccattgcggaaggccgctcctgcgctgccgccgtggacgagtacctcaccaaggaaaagagcgagctaccggcccccatcaaggccagccagcgccccatgatgctgcctcgctgaatactttcctaacaaaagtatgaaaatcccctctttggaggggattttcgcgtttcttggattaaagattgccttaatccttaagtaatgtctatatttcgagaatattgcatacatggttaatatgaagctcctatggtggctttcgtcgctacaacgcgacaacaacactgtgggagagaattatgaaaatacgccacatcacctcattggttgcggccggagcggctatcgtcatgctgctcagcggttgcggatcgactggttcattcagcaatgccagcagcacgtcaggctccaatatcatttccgtctacggcagcgaaccggcacacccgctgttcccaggcgctgtgaccgaggcaggcggcggcaaggtcgtcgatcagctgtttgcaggcttggttacttatgataccaagggcggcattcacaacgaggtggctgagagcatcacctccagcgacaatgccacgcattacgtcatcaagattaagaagggatggaagttcaccgacggcacgccggtcaccgctcattcattcgttgatgcctggaactacaccgccaacagtgccaacaagcagggtagcgccagcttcttcagcaccattcagggttatgacgatttgcagaagtcggatgttgacccgagcgcaacgctctccggtctgaaggttgtggacgattacaccatcgatgtgaagctcagccagcctgattccgcattcccggtcaagtccggcagccacgcgtacatgccgcttccggaatccgcgttcaaggatccgaagaagttcggtgagaacccggttggcaacggcccgtacaagtttgtttcctggagccataaccgcagcatcaagatggtcaagaaccctgactacaagggcaatcgcgtggccaagaacgatggccttgacttcatgatttacacatctccggactccgcctacgctgatttgcgcggcggcaacctggacttcactcacgccatcccatccaccgcactgaagaccttccagtccgataagtcaatcaaggcttacaatcagcccggtggcaacaccctcaccttcaccattccggaatggcttgaccacttcggccagaatgaggaaggcaatctgcgtcgtcaggccatttccatgtccatcgatcgcaaaaccatcgccgagaagatcttcaacaacacgtccacgccggccgttgacttcattgcagcgccaatcagcgcctactccaagaaccttaagggcaatgaagtgctgaagtacaacccgaagaaggctaaggaactgtgggccaaggccaacgccatctccccgtggagcggtgagttcggcattgcatacaatgctgatggcactgcgaagaactgggttgaggcaatctgcaactacgtcaagaacacgctggatatcgatgccaagagcatcccgatgtccacttccgacgaattcctgtccaatgtggattcgggcaagatgacctccgcataccgcagtggttggggccctgattatccatccgcggacaactatctggtacagctgtacgattccagttcggccgacggcaagggcggcaacagcggcaactacaagaaccccgagttcgatgccatcatggacaaggctctttccgccccgtccaccgaggaagccgacaagtattatcagcaaggtgaggagattctgctgcaggaccttccggctatcccgttgtggaaccagaatgccaccgcagccagcacctccgcggtctccggcgttgaattcgattacggtggcggcccagtgttcaccgcactgaccaagaagtagtaagtaataaacagacagcgctagccccccgctggcgggggctgtcggcaaagccgactgggggtggtctcaaaacagcagaccacccctaatcttgttatatgggcgcgctcccgtaagcgggagcaatcgagaacatacaggagcactttaactatggaattcaccgtatccggcactaccgtgcgattcgatgaacgaacaatgcagttcgcttttacgcgcgacggtgccgaatggaatacctgcgctgatttcaagccgaccctgcaatgcgcgcaaggcaccttcgcgttcgcagatgccacttccatcacccatgagcagcgtgaaaccggcacgggaaccggcattcgcagtattttcagcggctttgggcacagcgcatactcctttgaaacctatgtatgggtggagcgtgcctcaggcgatgtgctcttcgaatggattccgctcaatgagcaagggctgaccgtcaccggtgtgacgtggcctgcggcaatcgccttcgaccgtgacgactcccacgacgtgacgcttattacccacgaacagggcgtgatgattcccaacacatggcctaccgccgtgagcaccaaagatatcaccttcgacggccgcttcgaaacggctggcggttacatgccgtggttcgcgcagcttcgcgcagacggacacgggtatatcgccatctgcgaaactccatggaatgccggttacggcatcgaccatcccagcaatggcccgtacacccatatcaatacttggtttgagccaagcctcggcacaatgaattatcgccgagtggtacgctaccagttcctcgaccacgccgatcatacggcggtgtgcaaggcctatcgttcgtacgtcaacgaacgaggtcgcttgcgtacgctcgccgaaaaggcggcgcgcaatccctccgtgcgtgacctgattggtcgttcatgggtgcacgtcggcatcaaaaccaaagtgcagcccgactcgttctactatgacaaggaccaccccgaaaagaacgattcattggtcacctttgcgcagcgcgagaagcagatgcgcacactgcacggcatgggtgcaggccgactgtacatgcacttggatggttgggcacagcccggatacgacaacgcacaccccgactatctgccggcttgtcaggaggcaggcggctgggaaggcatgaagtcgctggtcgacgcctgccatgagcaaggcgatattttcggcactcatgaccagtaccgcgattactacttcaccgcacaaacctttgatgccaacaatgcgattcggctggcagacggtacgatgcccgaacacgcacgctgggcgggcggccaccagacctatctatgcgccgaactcgcaccggactacgtacgccgcaatttcacccagattgccgcgcaaggcatcaagctcgactgtgcatacttggacgtattcacctgcaatgaaggcgacgaatgctcgaaccccgaacaccgcatgacccgccgcgaatgctttgaccgccgcgccgaatgcttcgaatacctgctttcgcacggcatcctctcctcgtccgaagaggtatcggactgggcggtgccgagcctggtattctgccattacgcgccatacgacttccagatgcgctcacccaacgaaccgcgccaaggtgtgccggtgccgctgtataacctcgtctaccatgattgcgttatcgaaccgtggatgatggagcgtgtggtggatggcgacgattacatgctgtacgccttgctcaacggcggagctccatacctgattcgcgatgccgcatacatcggcgttgacggcgacatggacgacgaacagcgcgctcgcacggaaaacgacatcgaacgctgccatacggtcgctgcattccatgagcgggtcggcatgcaggaactggttcgtcacgagttcgtggatgatgatccgctggtgcagcgttcggtattcgtggacggcactgcggtcacttgcgacttccatacgcaaacctatcgcatcaccgattgaccgcatcactgactgaaaaaacaatgacacacagtgggttccgatggactggtggcaaattgccgccgataagcgggtaatatagccaacagtgtcaccgtcgaaacaggagtagtgaaatgccgaatcgtgcagaacgccgtgcccaagccaaagcaggccgcaggggagtgccgtcgcagtatgaccagacccgtggccgtggccgttcgggaatgattgacgaatatcagctgcagcagaagtcccagcgtctgcaggacggcaccgacggcaccgaatggaagcccagcggcggtacgattgcggacaccgaaaccctgctgaccactaacccgaactacacgaatccgaagatgttcaaggcaccgcattcgctgcgtcagtggttccgcgtgggcagttggacgctgatcgccatcgcgattatcgcgttcttcgtggttatgtggctgccaagccatccgatgtggctgatcatcaccgtttccgcggtgttcattgtgggtgtgctgagcctgttctttacggctggcgattccaagcataatccgaatttggatcagaacggtacggccgtctgatcttttgcctggtaaatccggcttgagaagcaaaacgcacgacggaagttgtgcgttttcttgtatgcggtgccctaaagtaagaagtgcttgagtttctttctgacgcacgaaggagaggcagtccgatgaaagttgatattctaacccgcgaatacccgccgcatgtgtatggcggtgccggcgtacacgccgaggagctgtccaaggttttggccgagcgcattgacgtgaccgtgcgtgcgtttgatggcaagcgcactgaggctgatgtccccgcgattcccaatgccgctaatgccaagggcagtctaaaggttgtcggatacgatacgccgtccgagcttgccgatgccaatccggcattgaagaccttcggcgtggatctgcagattgccaacgacgttgacgccgatatcatccacgcacacacatggtacgcctgcctggccggctacttggccaagatgctgcacggtacgccgctggtcatcaccgcccactccttggaaccgttccgcccatggaagcgcgaacagctcggcggcggctacaacctgagctcctggggcgaaaaggaagcctacgagaacgccgaccgtgtaatcgccgtgtccggcggtatgcgcaaggatattctgactgcttacccgaacctcgatccgaacaaggtggttgtggtgtacaacggcatcaccatggccgacttcgctaccccggcaccagacgatccgggttggaaggtgttcgagcgttaccacatcgaccgctcgaagcccaccctgctgttcgtaggccgcatcacccgtcagaagggtctgccatacctgctcaaggccctacatctgatttccaaggacattcaggtggtgctgtgcgcgggagcgcccgacaccccggaaatcgccgaagaggtcaagactgcgttcgccaagctggatgaggagcgcggcaacatcgtctggattgaagaaatgctgccgaagcctgagctgaatgctttggaacacggctgtgatgctttcatctgcccgagtatttatgagccgctcggcatcgtgaaccttgaggccatggcctgcggtctgccggtcgtcgcatccgccaccggcggtattccggaggttgtggtcgacggtgaaaccggctatctggttccgattgaccagttgcacgacggcaccggcactcccaccgatccggacaggtttgtacacgatatggccgccgctatcgacaagatcatggctgaccccgaactcgccaagaagatgggccaggccggctacgaacgcgcccgcgacgtgttcagctgggagaccatcgccgacaagaccgtggaagtctaccagtccgtgctcgacgagcagaagaagtaagtagcgctgcaacgagtgctcccctcagtccggcgcaggtgactgaggggagttctcagaccgcgaatcatagctagtatttcactcatgacaaacaccgtcctccaactcgacaacgtcgaattccggcgcaaccgtcgcgtcattatcaccgacgtgaacctcaccatcaacgcgggggagcgttgggtgctgttcggtccgaacggcatcggcaaatccaccgcggtcggcatgctggctacccgcaccttcccctcagagggccgcgtattcatcctcggtcatcaactcggcaaatacgacgtattcaaactgcgcacccgcatcggtctcgcctctgccgacctgggccggcagttccccgagttcgaggacccgctggacgccgtggtcaccggcctgtccgccgtgaccgggcgctggcgcgacacctacacgcaagaggaatacgcccgcgcccgccatctgctgcgcgattttcgcgtctcctatctggaaggcaaggagatgtggcgactgtccgaaggcgaacgcacccgcgtattgattgcccgtgcgctgatgggagatcccgaactgctcatcatggatgaaccgaccaccggccttgacctgggcggccgcgagcaggtgatgcgcacattgagccgaatcggcgaagagagctccgagcgtgccgtggtgctggtcacccatcgcttggaggagattccggccggtttcgaccacatcgctatcatgggacgcaagccgattcctgccgaggacgccaccgaagcgggcgtggattcaatgggcaatcccggtgctggcaccatcgtctacactggttcgttggagaatggcctgaccgacgaacgcttgtcggaattgttcggtatgcccatcgaagtccagcacacccacggccgctgggccgcctacgccgtgtgatgcttgtaggttttttaggcgggattttcttcgccccctctggagaggggctgtcagcgtaagctgactggggatccaaccagttacgaaggcaaccatgacaaccaatagcaaactcgtattcatcgatattgacggcaccctagccgacgaaaaccacgtcgtacccgaatctgccaaaatcgcttgcaaacaagcccaggccaacggccacaagctcttcatctgcaccgggcgttccgtgccgaaaatcgagcgcagcatcctcgacctcggtttcgatggcgtggtttccgtggcgggcgctcaggcgaatatcggagacaggctgctgttccggcatctcgtccctcctgaagcggtcgatgcggcgatggcgtattttgccaagcatcatatcgagagctaccaatggcaaggtgcggatggcatgtacatctcggaaggctaccgtcaacatctggaatcgaaaggcaagacctggaatcgtggcgaattcgcgcgattctggcacctgttggatgaggtggaggtgccgactggctcgactttgggacagacgattcatgtgagcaaagggtcatacttcacctcgccgaatcctgacgtgactttcgaggagactcaacatgatttgagcccatggtttgagctcgtgcatggttcgtatgacaagctttccccgaacaatggcgagttgctgattaatggcatcgacaaaggtaccgctgtgcgcgacgtggcttctttgctgggctatgccattgccgacaccatcgccatcggcgactccgacaacgacactgccatgctcaaggccgccggcacatccgtagccatgggcaacgccattcatggcatccaagccttctgcgacttcaccaccaccgacattcacgaggacggcctggccaacgccttcaaaacgttgggactggtgtgaggctatgtcgtttgctctcagacgaaggatcctttcgtgctgtagtattgcgacgcggcacaacgtatgctgcgccgagcatagagaattgtgaattcaaaatggtttgttcatcatgcgaaaatagtggtcatctgtccgtcgcggttgcgcaatttacggtggcggaggaaccggaacggaatctggagatcatcgacggattcgcgcgtgatgcggcggcgggcgatagggaagccgatctcattactgctgagctgagtcgtgagtgtcttgattccgcgcatcgaacattgccggtgttgcagaatcgccgttttgccgatccgcagttgtgtgactgacctctgaataactttactagcgctgttgataagggttctatgatgggaatcatgaccactactgttgatagctctgattcaatgccggaacgtctgcaagaggggagcgcggcgcccgatttcactctgccggcggttatacctgggtttacagagagcggatcaatcaacctgtctgacgtgctcgatgccggccgcagggttgtactgtacttctacccggccgcgatgacgcccggatgcaccactgaggcctgcgattttcgagataatcttgctcggctggaatcgcagaatgttgtggtgctcggtgtgtccaaggattcgctcgataagctgcgcaagtttgccgagcgtgatcatctcacgttcccgctgctgtctgatcccgacctgaccgtgcacaagctgtacggcgcatacggcgaaaagaagctctacggcaaggtgcacgtaggcgtgatccgctcgacgctcgtcatcaatcccgatggctccgtggcgattgcgcgctacaacgtgcgtgccaaaggacatgtcgattcgctgttaaaggcactggaaaaagttggagaagctggagaagtagtgcgttctcgttgttcggacacagtggttcgtgcatagcagttccgtgcgacatgtgccgtatgaaccactgccgtatgaaccaccggttgacttctcggactcaccggtaaatagtgagaccatgggcgcgcagtacgtctatggctagcatgtaattgagcgatgttgcggtgggattgagcatcagttcgcggatggcggcggatgctgaggactcgcttgtcttcgaggattctgcggccgggaagagggcgtcggcgattagggagatgatacgggaacgtgcatcgccggcattggcattgttgctgctgttgccagcgtcggtagtggcggagttgccaatagtagcggagctgttttgtagagtcgtatccaacgctgtgacaagcggctccaggttgttctttgtcgcctcggcaatgtcatcgagctgatcgaataaggcgaacagccatgcacgacttcgctcctcatcgttgccggtcgcaagcctttcattggtgacgcgcacgagttcgtcaatcggtactgctggcgtctttgccggatcgcgatgctcacggttgtcttcgatatcgcccataagatgctggatttcgcactcgtcctgcaatacggtggtctcggcaaatgcggtggcgatggcgtctgcatcgatgaacttgccaccttcggactggaagcgcacgcgcttgggctcactgtaataatgcgacatgccgaatgtgatgtactgaggcatctcatcctgcaattgcttgactgcatccgctaccttgcgcatgtccgcaagctgctgatgcaccacaataaaggcaagtattgctttggcatcggcgagagtgagcgactgcccgatactggctccatgatgatgttcgtgatgcgcaaacatgttcttcagcgaatcaaacaatcccataatgtcctccttcggactgggcacaatcggctacatctgccgcttactgtagtcccgaatatgagggaatggttcgtggaacgccgagagcgaatattgacgtgcgtgtgctgagttcttttgacttagatgattggaggaataactgaggaaatgaataacctcccagcgattttaaaaagcacttttgcatgattagcgaggcaaatcctctggtgaatggagattttggctcactgatgggcggtcagtgaagtgttcttacggttgagttgagcttttgcttcgctgagcagtctcagtggggcaaatcttcggatgggccaaggtattgctttgctgagaggccgctaagcggggcttttcctctactggctctctgggttgcgccactggtgatgattcagcggggtgttccctcaggtttgtcgaggtttcgcttcgctgaacagatctaggcggaacattccctctagtccgtcgaggttttgccctgttgaagtagtcctgagcggagcaaaccatcgattaggaagaggttttgattcgctggtgagttctgagcgggtcatttcttcgggctgattgaggtttagctcctgctgagcagagctgggcgaggcgaatctgtgggcgagtcgagaatgtgcttcgctgggctgcacctcatcgaagcgtttcttcgaattggtcgagaaaacgcttttggattcgctgattgtcaatgaatgacgagtcaacaccacagatatgcgcggacgtgggcttatcgatgatgtgcttgggacggaactgttggcataaggcgctcgcagtgagcgaacattcctagtgttgggccgttacgcttcggctgagttgggaggcagccttccagaagtagatggccgaggcgatggacgtggccaggccgacgatgagtaggaatatgcccaccactttgttgccggggaagttggcgggtgacagggaaatatctgtcggatatatcaccaccatgagggtgagcgtgccgttcagtccgattgagcaggctacggtgagggccgagcagagacgtacgagtcccagcatggatttgtatacggcgagtgatgccgcgcggccggtctgttccttcatgatgccgtgggattcgagggtagctgtagtagttgtgttccgaggtgttagccaacgtgtccttgcgcgcatacacgttgatgagcgacgtgccagtaatgaagagaacaacaaacttgaataaagctccgaaaatcccgctataggggtcgaagaggtcgcagacaaggctcagcgttccaggagcatacgcgatgaaaatggtcaatgcgctactcaacggtgacgcctcccatgttgtttattcttgccagtcaggtagggcaagaatatgctcagtgattctccctgttcgcgtattacggcttcatatagatacggcgcatgacgaattcgactatgcgatccggtaggaaacgcttgagttgcatcagggccttgtagctgccgccgacggcgatgcgcactggaggattgcgtttgccgagcgtcgcgacgatgactcgggccacgctttccggaccgtcaccggtctgctcgtcatgagccatttgcccgaccgaacgttggcattcgtcgtagtacggtgaattggctggttcggcgaggatacgcgagtcggtgaatccagtggataggtcacccggttcgatgattgtggcggtgatgccatgacggcgcccctccaaccgcagcgcctccacatacatttccagcgccgcctttgtggaagagtagtgcgattggaacggcaaacccagccgtcctccaatcgagccgacaacgatgactcgtccccgcttacggttgcgtgccgcggtacggcgcagcaacggcagtgcgatttcgttgacctgcaacacgccaaaataattcacatcgaactgcttgcgagcgagcgtcattggtgtgcattccgcagaaccagcgatgccgaatcccgcacaatggacgatggcatccaatcgggggagagcgctgagaatgcgcgtgatgtcagccggcttggtgacgtccatctcgtaggtaaacagttcgccgcggccaatatgctgagtctcgggaatgctctcctctgtatcgagtcccaccgaaactacatgccagtcccgcacagcgagcactcgcgccgtcgcctggccgataccactcgtacctccggtgaccaatgccaccagccgtccatcatccttgattggttccatgtgtactattatcgcgcggtggcgatgacggaatcacggcgtagtgatgacagcagattttgataatgatgaaatccttagtgcaggcgaaagccgcgcatggagctaatgcagtattccttcctgggatgaagcacatatttgctatgtcgttcagtcctgaccattgtagtagatggactttaagcttacgcgtggtttgggtccgtggtcggtgacacccccgctgatccgttgggttccgctgaaagagttggagctgatgacggtgactgtgggggtgtgctgtttttcaggtaatcgacaccgtacttgagggaatcgtagattctgatgtccttgcgtaggtcgtagtcgagctgttctcccgactcgattttggctttggccacggtcttcaagaggctttcaagcccagtgagatcgatttcagattggtgtagcagaacaaggtgtttgtaagcgtcattggggaatacgctgatgaggccggcaatacttttgtcctgtaactttactcgtctggtctcgcgaatccttcgatctgtgttgttgagatatgcctccattgtagttttatcggcgagctccttttgagttcgctgacccagcggtccgtcataacgttgcaaatagtagtacatgggagcgccgccctgcttcaacatcgcatccaagcattctccgataaccagttccggtgagaattgcttgtttttgaagagtgcatcttcatgaagttcagacaatgttactttgcggccgtagtccatcactccgacgccaacaatcacatttttattgggcgggagttcgtccatatgcgaaagtttcacggcgactacgctctctgcacctgttccggtataagaagctttgtacagctgcctcagaatttggttcagtactttcggcgcatagcgttgattggtttgggctatggcttcataaatcggggcaaaatttggcgtgctgatagccgtcatctccacggtttggccgttgtctacttcatagcttgcggccttaatggcgcaggattctgaatactgtacgaagatgaaacgtttagcgatttctcgtgcacgagcttctccagcgcaagatgcaattgaagaaatgatttcccgtatatcctgatcattcagcgaatatccgaggaaaatgattgggtattcaccgaaaatggtgaggatcttcgaggtcaggtaatcctgatgatttcggagtcgctggtaatctcgttcattgataaccatggagctgggatcctctgcggatccatgaatcttgtagatttcaccaatgcccatcagtggggaaaacagcaaatcctcttgtcggacatatacgtcgtatttcgggaacaccgattccataagtccgtcataattagtagtgattacaccggcgacatgacgggtcgctttacgtaatatatccaactcttcggtcatcaatgttggtcgaaacgaagacagatgctcgacgacgtacactttcatcggggagattccggcttcaaactcagcgcgatgcgtttcgacccaatccgtgaatttgggttgattgatggcatcaaggaaatctctttccatcaacgaggcgatgcgagggtagaccgtgttctttttcccgtctccttctgattcggccatcagtttgtattggaagtatggtttcattgggcttccggcattctcacatactcatttgagcaagccatcccagtcttcggtacccatgtagcggctgaaatgcctgatcctacgaacaggaagggtacgcggttggcctcggttaataggtgcagtattgtttctcgcacctgtgtgttgaaatctgtgtccaccatggatgtcccctctccattgtcggtgcatgttggttcaacactttaccgtatgaatggaatgctcggctcaatctttcgaaggtcgccatgaggagttcgcataattttgctgaaagaagaatcgcgttattcgacaaatcttgtatgcagaagggctatttgccattagcgcaatatcatccgcaagattgtttatctcgaagtcctatgccaagtgtctgtcatctggtagttcacatctatcagttcctggcgctggggaatcccctttattacagttttgattgctttttcgagatcatcttcttttttaccctatctggggtagactgaaatattcttgtgcctgagcgaagggaggattacatggcgggctcatacggtgcggagtcgacacgaggggagcggtacaggctttccttcactgtcggcgggcttctttctttgcagggtcgcgcgcttgccgaaatgtatctggaccatgtgggttgcagtaacgctgggtgttcttcccaagccgaggtgggcgaatccattgccacgattcgccagcaggccatcgaggaaaacgttctcgcgattcgcacagattccgcgaacaggcgcgttgtggcggaaactactaggcggctcagtgcgctcacggttggagagcttgcatatttggcaggcccggattcctccacatccgaccgcgaggcacttatgtggatcgcgatgtgccgttattacgcaatcgtcggggaattcgccggtgaagtacttaaaaagcattatcttaccggcaatacgcatctggactttgaggattatgatcggttcattgcggacaaagctacatggcatcctgagctggaaaccataagcgagggaacggcgaagaaactccggtccaatctgttcaaggccatgagggaggcacatctgttcgataaaaattccgacatggtgttgtctttccttcccagtccctctttggcggatattcttagaaagagggcggattcgttcgggtatcttccgatgcgcgaatcgtcattatgagcagaacggaggatagcatggctgattccatcgccaatattggatttgtggatgagcgtcgtgacattgatgctgatttcgctcatttatatgagatcatggagtcccgttcattccggaccaacagcgggctggcgggagaacagccgtattacatctatgactatccgcccatgcaggagcttgaagtcgccgagcatatcaagcagttggcgaatcgtctgcagacgatgacgccgaaagatgatggcgattacgctccgcaagtgcttacgttggatttgtacgacattgctttggagattcttgagaagcgtggcattttggatcgcatattcaaaagggaggaaaaacgccacaaaaaagtttcatcggatgttcacacggataacttcttgagattgctcgacaatatactgggtgccgatgcgaatcatctgcccgataccattcgtgatcattacgagcaggccaagagcgaaggcggggccgatatcgtgttcattacgggaatcggcaaggtttacccgtatattcgtgcgcatacactgctcaacgcgttgcaaggacgtatcgatgatcgcccgctggtactgttttatccgggtacgttcacaagaagcgctacttcaggatcggtcatgtcgctgttcaactgtttgccgggagacaattactatcgtgcgcaaaatctgcgtgagatgagcgtgcagctggaagcatagcagtttaaaggaatgtcctgtcagctgcaacatggcaagaggcaggatttgcaagtattcgttcgaagaagaagggacacaaatgaacggggaaaacggcatcagtttcaaggagctgttcagcaaggacattgaccgcaacatcaatggtgtgatcaaggccaatgatgagaagaaccttgacgatgaggtcaatgagtatgtgctgacggaggagatttgccgcaatctggccaaattccttgacgcatacaacgacccgtcgaaccacgaacagaatggcgcatggatttccggtttcttcggttccggtaaatcgcacctgttgaagatgctgtcgcatattctgggcgaggtcccggctgaacttgttgacaagggcaataagccgaccatgagtcgcgaacagattgttcatgccttcatgggcaaggccgaagcacaggatgaccagatgcttgcaggtcagcttgaaaaggctttgacgataccagccacgtcgattctattcaacatcgatcagaaggcggataaatccaatgcctccgacatgctgctgtacgcttttgttcgcgtattcgatgaggcgcgtggtttctacggcaagaatccatacgttgcgaaattcgaacgcgatttggcgagcaatggttatttcgaggatttcaaacaagagttcgagcaggtggctggcaaaccatggagcgaaggccgtggtgaggccgtgctatgggatgatgagatctgcgaagcctatgccgcggtgacaggcaaaccggagcaagacagcatcatccaacggtacgaggatacgtacacgatgacggtcggcgacttcgcagacgacgtgaacatgtggctgtcccgtcaggaaccgaaccgccgcatcctgttcctcgtggatgaggtaggccagttcatcggtgagaacagagagctcatgctgtcactgcaatccatcgccgaggatcttgccgtcaagaccaacgggcgtgcatgggtggtggtcacttcccaggaagacatggataccattgttggcgatcggaccaagcaacaaagctatgatttttcgaagatccagggcaggttctccatcaagctgaagctcaacagcgccgacgtggtggaggtcattcagaagcgcttgctgaccaagaaaccggaatatgagtcggtgatgaacgagctgtgggatgagcagaacgcgaacctgcgcaccatgttcgaattcactcgtgagacttcgaaattcagtaataacaaggcatacagcaaggacgatttcatcgcatcgtatccgtttgtgaactatgagttcgagctgttccagaacgtgctgcgggaaatgagccggtacaacatgttctccggacgccacgcatctgtgggtgaacggtccatgctctccaccatcagcagcacgttgcgctccggccagaatgagatggtcggggccctgatgccattcgacaaactatatgacggtattgccgacgccatccaatcaacctcgaacttccgcatcaaccaagccgaaaagagactcggctccgatataaaggagctgggcgtgcgcctgctgaaggtgctgctgctggtcaagcatgtcgacggattccccaccacaccgcataacctgcgcattctgctgaccgaccagttcgacatggatgtgatggaactggaacggaacatcaagtatgttctgggagagttggaaaaagatacgtatgtgcagcgtgtgggagatacctacaattacctgaccaacgaagagcaggatatcgagcaggagatcaaaagcacggacatcgactccagcaaggaaatcgacgagctgaagaagatcctggtcagtgacgtgctcggcaagatgaccgtggcatacggcgagcagcgtgcccagttccgctatggtttgcgcatcgatggggtgcaacagtccgcgcagcagctcatctggctgaacgtggtcacatcgaccaatgcgcaggaccgtgcggacgccattcgcatgggcatgggcatgcgcgacaccatcactttgctgttggatatgtccgacaggacactgttcgatgatctgcgcatgtacgtgaaaacctacacatacctcatgcgcaccgacaagaacagccagtcagaagtgcgccagcagatcatctcccgcaagagcgtcgccaatgaaaggctttacacggagctgcgtacccgcatcgtcaaagccgcggccaatggcgagttcgactataacggcggaaaagtggaagtgaaatccaccgaggtgcaggcgcgtatggcggaagggcttggaacgctcatcggccggtactacacgaacttttccctacttggtgggcaacgatatgaggaaacggatctcgctcgcatcatcatgaacgcttcgcagcaccagcctggcatgcttgacggcatgaacgcagtgcaggacaagctcgacgttcccgccgatgatgtgttcgccgcggtcagtcgtgacaaaggcaaaggtatggtcgccaccgtcaagagccttcttgatgcctacggcagcgttccctatggttggccgtatgccgccacgctcgcatgcatcggccacttgtatggttccgacagaatcacgctgacattggatggcaagccggtgcagcgcagcgaggccgcccgtttgcttagggaaacgaagaagcaggattccatccgagtggatctgccacgcgtattcgacacgagaaaagtttcacagctgcgtgacttcgccagggatttccttgggctcaccgccgcggacctgccatcgaatgcgattgatctggcggagaccgttaccacgcgacttaagcgggaagcggagagtttgacccagctgcgcgtgcgcaatgcccgattcggctttgtgcagcagctcgacaaggccattgagaaaatcaactatgcctccggaatgggtgaggactggctgcttggcgatttcaccgcacaagaaaccgaaaacggttccgaggaactgctcgagtttaaagaagacgtaatcgacccgattgccgctttcctcaacggctcccagtccaggattcttgcagacggattggaatggctgaaaaacaacaagccgaacatcgactatgtatctggcactacggcaagcctgtaccaatccgcggaacagctggcaaacgacccgaacatcttccgcaaaaccaataaattcaagactgccattgacgatctgcgtgaggcaacagacgcaaccatccaaaccgaacgcgccaacgcgcttaaagacgtggaagatattcgtgccagaatccacgattccaccgaatatcagcacgcaacacaagccgcgcaaaccaaggtcgagacagaactggaccaagtggcggaacgcatgcagcacataccgttcatctacaaaatgcgcgaaagcgtacacgaactgagcgaacgcacttaccctcaactcatcaacgcactagcagcctccgcgccgaggccgaagaccgcgctcgcaggagaggcgcaggctgctacagctactacgccgatggatgcgaacattcctgaatcgcaacaaaaggaaaccccgcgcgtggccgtgtcgttcgctaccattagcaggcctcacaccaaggatgctttggaaaccaaggatgatgtggatgacttccttgatgcctaccgccgtgagcttatcgccgccattgagaatggaaagaagatcctgctatgaacacgtcgaaactgcaagctttcgcaacggatgcgcgccgccagctcatgaacgcggtgagggcccggcttgacgcctcattggtgccgaattccgacgcccaggttgacgacccgcgtgcgttcgattttctgcagcatgagatcgagcgtgccggcggcggtgaagagggccgcaggcatgtggtggaacgttatgcgtaccgatggttcaaccgcatcatcgcgttccgttacatggatgtgcacgggttcaccggcacgccggtggtctctccagccggtctgaccagcacgaatggactgccggaagtgcttgcagccgcgaaacgaggcgagtatgacagcagggtgttctcgttgcgggtgaatgataaggccaaagagcgcatcgaagggttgctgagcggttccatcttggcggatgacccgcagggcctggcttatggtctgctgctgcaatccgaatgccggttctggaatcgtaacctgccgttcatgttcgaaaacgtcggcaaggaggccggcagagtggatgaactgcttatgcccgccgatctgcttgccgagggttccgtgttgaggaatgcggtggaggttatgactccggaggattgcggtgttgacgatccgtccggcaatgtggagatcatcggctggctgtaccagtactacatttcggaacgcaagaacgaggtgatggacgggttcaagaagaaccacaaggccggagccgaggagattcccgccgccacccagctgttcacgccggactggatcgtgcgctacctcgtgcagaacaccgtaggcaggctgtggatgcaggcccatccggatagtaagctgtacaagaactgggactactatattcagccttcggaggatgattccactgggaacgagggtattctcaatatccaagcgcctgaagacctgactgtctgcgatcccgcatgcggttccggtcacatgcttacctacgcgttcgacctgctgtatgagatctacgaagaagaagggtatgcgccgagcgatatttccggcctgattctcaaacacaacctgtacggcatggaaatcgatgaacgagccgcaagccttgccgccttcgccctgaccatgaaggcacgctcccgttcccgcagattcttcaagaagcaggtggagccgaacattcagcacatttcgccgattgcgttcaaggaagacgaagtcgccgagctgaatgacctataccaagtggatttggacttcacggtatggaatacctatgcgaaggcggatatgtacggttcgctgattgagccgccgcaggagcttgttgatcttgcctcatcggcagaagacactgaagccgaaaccacattgtttgactcgcttctgcgtgaatgcgcggaggaggttttcgcccagacaaggtgtctcgcccgcaaatacacggcagtagtggcgaacccgccatacatgggcgcaaagaacatgagcgccgagctcaaacagttcgtgcaggatcgctatgaggatggtaaagccgatctcttcgctgcattcatcatgcgtaaccggcaattcctgcgacataacgcgatgttgggcatgattacgatgcaatcgtggatgttcctgtcttcatttgaggatttgaggcgcaacctgcttgcttcttcagctatagaaacgatgtcgcatcttggtgccggagcattcgacagcatcggcggcgaagtggtctccacgaatgcgtttacgctcaaaaatagccctagtagcgggaagggtatttatattcggctggtggatgtctccggtgacagtaatcaggcggatgcttgtgcggaagcgattaacggtgatgcgaattatcgcttcgaggtgaaccaacacgagttcgcgcagattcccggttcgccaattgtctactggctgtccgaggctgtttttaaaatattcgacagaaaaatcgctaagggcgccggtggtgacgccctgagcgacatcgccgatgtcgctcagggcgtcaccaccggcgataatgcgcgttttttgcgattctggtgggaatgctactgtagaacaattcaatttgaccgaatctctttgcaggaaactccactgcaaaggtgggttccatgtgataaaggcggcgacttccgccgttggtctgggaacaatgaatatattgttgattggactgaaaacgggaagaaactttttgattttccgggctcgactccacgaaatcgtgaaataacattcaaaaatgcattagcatgttcaaaaatcagttctgggcagccttctttccgaagacgcaatcatggatttgcgtatagcgacgctgccgttgctttatcggactcaaccttgttgtctgaattaaactgttttcttaattcgacaacggctttaactattatgcaggcattatctccgacacttaattttgaagttggacagattcgatcgcttccatgcaaatttggtatttcagctaactggcgcgaccgtgagaaagagcttgtatctgcaagtgaaaaggattgggattcttttgagacgtcatgggatttccaacggtttgcgttgcttgaccctgatcagggtgcccaagcaggaaatttgcttgaagatgcagtattacatcttcgggagtattggcaccgcgtgtccgaggaacagcgccagcgtgagattcgtaataacgagatggttgcggatgcgtatggcgtgcgtggtgatgtgccatgcgatgtgccactggaacgcgtgtcgttgaaacgaaacgtcgcgttcgcatatccgaaggacactccggaagtacgcgacgagaaattcgcccaagatgtcgttaaggaactcatttcctatgcggtgggctgtatgttcggcagatattcgcttgataagccgggattaattcttgcatcgcagggcgagacgcttgatgatttccacgtgcagattccgaacccatcgttcgagccggatgtggacaatgtcattccggttacggaaacggattgctttgaggatgatattgtgacacggttccgcaggttccttgaagtcgcgttcggcaaggagaatctggctgcgaacatcgcgtgcatcgaacaggtactgggcaaaagcatccgcaagtatttcgtgaacgacttctacaacgatcatgtgaagatgtattcgaatcgaccgatttactggcaatactctagtcaaaccagcaacaagggaaccttcaaggcgctggtgtacctgcatcggtatacgccgaaaaccacaaacgtggtactcaactatctgcgtgactatgccaacaaaatcgccgacatcgccgataacttggaacattcagatcgtgccgcggaccagaaacaggccgccaaactacgcaaggccgttcttgagtgcaaggattacgaggaccagaccctgtacccattagctacccgcaacctggaaatggatctggacgacggcgtgctggtgaactacctgcgcatgggcaaagcccttcgtgccattccctccatcgagcgaaagcgaaaagaagtctccacctggacctggcccgttcatccgctgaaggaacaagacaaggaagtcagtaatggcaaagaataagctcagcatttacctgataaaacaagatttcccagtaggggagatagtccctcctgcttcagataatgggaatcctattatcgaattgcaaattaaggggcatgagagttgcaagctgttcgttcgtgccacaaaaccgcatgaacctgaatgggctaacgcattttttaattcagcagtagaaagcgaatcccttaaagttgccaatattggagcggctcttgtcattccagttctcattgagaataattcgtttgatgcaaaagcagatgaaattttttcgtctgttggtgaagaaaatcggcgttactttgttcttacttttggatatggtcgtacgcttatcaatcgttcggcaatagaggaacgttttggtctgaaatgtgtacttaattctgtaaaaaatgatacattgagagcgattcatttcgctgatgtctcgggtagtgccaagcgttcaagtgaacagttgtcacgaataggagatatcgatgattttgccatcgatactgaaaggaatttgttaagccaggtaacggctaaatgcggagaagatgagttgctgtgtgggacggtgactggcggtgattcgcttgctgttacaaaagaaattgatatagataatgtgcaagaattccttaaatctctctatgaattgttctgtcaagaaacttacaagcaagattttgattgggttgacaatatcgctcctgtaaaagatcccgctctagaacaaaaattatgggacgaatctattcggcaaatcgcaaactatagctataacgatgacagtcagcatgatttgtggatggcggttcctgatattattgattgggatagaattgaaggtttccaaattgggtctcaaaccgatgagaatgatgagcctatcattcaggatgatgtacttttagcagatgtacttcgttcttttaaaaagcctcttacttctattgaccaacttaaacataaacgagtaactgctatctcaaaagaaaatggcttgccttatcaaggttggcaagcgcataagtgtcttgttggtgatttggcatacggtggggaatcatattgtgtacttgatggcgcttggtatgagattcgctcggattaccttaatcgaattaatgaagattttatggatacgaacgaatcggatatagatttcattccatatcctcaaaatgatgaagaacaatttgttgatgattttgacgggaaaaagataaaacttgagaaggaagggctatataactataagcttgagaaggctcttgctcaaaaattccctaatcattttctcttaatggataaaagattaatttcgtatggtggtggtcgtagtcgaattgaattttgtgatgtgcttgctgatgatgggaaaagaattcatataaagcgatattcgggttcggcaacaatgagccatttgtttaatcaagggcttgtttcagcttctatggagcgggatgctgccgattatgcggaaaaagtgaatgaaaaaatcaagcaggttggcaaacaagaggggctgtcctcagttgagaattttctgttgaatcagaatcaaattcatgatgtcgttttcgccatagttcccaagcaagatagtcatagtcatgatcttccctttttcagcaaggttgcgttatgctctgttaaaaaacagctgaagcgtatggggatagagacaaaactgaattggattaaccgtataaatgagccagaagggcaaacgcctaatgagcattgagacattgttgaatggcgaatccaagaatgtggagtacaaactcacgcctccctctaggagcatcaactacaccaaaaccgcggtggcgtttgccaatgggcagggtggttgcttggtgttcggcgtcgaagaccagacgcttcgcgtggtgggcattgccgaagacaaagtgtttacggtgatggattccatttcggacgccatcgtcaatagctgcgagccgctgattattcccgacatcaccatgcatgatgtgaacggcaagacggttattgtggccgagatcgctcccggcttgcagcgtccgtaccatatcaagtcgctcggccaggaacagggaacattcgttcgcgtagctggcaccacgcgtcaagcagaccagcccaccattcgggagctgaccattgaaggcagcaatcggagcttcgaccaagtacaatgcctcggattgtccgtaacggaaaaagacattgaagcactgtgcgcaagtctgacaaaaaccgcgaagaacaacgccgaagaccccgcaaaagtcaaaacggttacggagaaacagttgctgcagtggggtgtgctggtagaacaagacgggcaattggtgcctaccaacgcctatgcgattctcactggtaatacggccgtccggtccgtggtgcaatgcggagtgttcaagggaaccaccaaagctgtgtttgtggatcggcgtgagttcacgggcactccgcaggagcttattgaggagtcctaccagtatgtgctgcgtaacatccatatgggcgcccgattcaagggcgtgtaccggcaggacgtgtacgagattccgccggatgccattcgagagctgatcgtcaacgcgatagtgcatcgcagctatatcgaccattcaagcattcagatcgcaatctacgatgatcgattggaaatcacttcgcccgggcgcttgccgctgggacagaccattgaacgcatgaagcaaggttattcgaagatccgcaacgaagcattggcctctgcttttgaatacatgggctatatcgaacattgggggagcggcatcctgcgcgttctgcaggaggtacgtgatgccggattgcctgaaccggaattccttggcggcgatacggatctgcgcatcaatatctatcgcaatggctcagagacaggttctgatgacgggattgtgacgggattacgacgggattcgctttctgatgacgggattgtgacgggattacgacgggattcgctttctgatgacgggattgtgacgggattacgacgggattcgctttctgatgacgggattgcggaagaaacaacttccaaaacgaatgctgctccgaatgccactattacagtgcttccatcccagaaagagcgtattcttgatgcgctgcgtaagaatgtgagtatttctatctctgacgccatacggatactgggtgtgcaggaaaggcaggctcaacgaatattgaagagcctaatagaggaaggcagtgcagtgaaaattggtgctgctcgtgctactcgatacgctgaagcgaagaaaaggacagaaccgcatgagtgaggatagccaagtaacaagactgctcgctaaacgtttcatccagccgggcgaacgcgggcgcatcgtattttggcgcgacgataagaagcagtatgtggatgatgtggcaacattggtaggcgagtgcgccaccgatgagatactgcgtgaggttgaactcatcactccggaaatcggcgatgagaacgacagacggtacattccgttcacggtgcgctaccgcatgttccacgagcagccaaatcaaaaattcctcgtatatctgacggagccggccccggcagatcaggacaactggctgttggatttggaattggcgtacggtcccacgttcaccatggacaaactcgccgtgacgctcacggaaacactgccggaagcttccgccgacacgcgaaacgtgtggttggaagtgatgaagcgtgtgccgaagttcttcgacagtgaagaacgcgccaagcgcttcgcgaaacgtcttaacgcacatgacgacgctaccgatttccaagcgaagatgatcgccacgttgctgcaactgaaagatgatcggcacagcatgcaagacatctgggctgagctacttacgcaatattcgcagggtgacgattctggcatcaccgcgattgaacgcatgggattaagcacgttccattggactggtacacgacgcatttatcgttttgatgtggatgccgatgccggcagcgaaccgacggtgaaggacttcgtgctatggctgttccagctggcatggaatggattctccgatggcaggaacgccgtctccacttatgcgaacattattcgcgactgggacgactggtataagaacatcgacatgcgcacggtactgcagaatctttccgaggacgccgtggaagaattgcaactgtccactcgaatcgccgatatgagtgtggaggagcttgccgaccgggacctgttccgcgacgtggacgagatgatcgtcaacaagctgttcgaacggttgggttcgcagtccattacagacgaccaagtgcaacggatcatcaatgggcgcaagcaaaagctctggtatgcagaatataccgaccaatatgagtgcattgccgcagcaagcaggctccgtgccgttctggctgaatgcggtgaactcatcagcaccatcagctcaccggaacaagggatgaagctgtatgccgaaaagctgtacaaggccgacggcgcatacagaagatatgtgctcgcatggcatcgcgccaacccggatgcggtgagcgtggacgatgatttgcaaagcgcctacgaggcatatcagcaggatctgggtcaggcatggcaaaaacaagtcgatacgcttagccaatggaagttcatagacatggacgcgcaaaccaatttctatgaacgtgaaatcgcgccgaccttgaaggccggcagaaaaatcgccgtgatcatttccgatgcgctacgttacgaggttgcgcaggaactgtccgaacgcatcgacagggaaagccgtttcagtacgaaactgaacatgcaatacagcgttctgccatcctatacacaacttggcatggcggcgttgctgccgcacggctcgctcgagttcgacggcaaagaccgtttgtatgttctggctgatggacgcagcaccaaaggaattgaagcgcgcaccgccattctttcggccgtaggcggcaaagcgattagatatgacgatttgacaaagctgaaagtcagcgaaatcaaagaactatataaatcctgcaacgtgttgtatgtgtatcacaaccatatcgacgccaccggtgatacggagaaaacggaatcggaaacagtggacgcatgcgagaaggcgttcaaggaactgggcgaagtagtcaaaaaacttgccagcggtaacgtccataacatgatcatcaccgcggatcacggattcctctatcaggaccgagatttggacggtacggaatggttgagcgaacagcccaagggcgatgcggtatgggtgagaaagcggcgattctccatcggatccaatcttgctccgggtcgcgcgttcgtgacattcaatgccacgcagataggaatggacgatgctcggaatgaaggcataagcgttcaagtgccgaactccatcatgcgcttgcgcatgcagggcgccggtgtgaagtatgtgcatggaggagcagcattgcaggaaatcgtcgttcctgtgctgcatgtcagtaaggggcgttccgcggccgacgatgtgagggctgtggaattcactattctgcaacgaaccgacaggctttccagcagacagttgactgtggaattcttccagaacgagcccgttggaggaaaaatccgcgcacgtaccgtattggccggattgtgggggcgcgatacggcaggcaatgatgtgctcatctccaatgagacgccggtcgccttcgatctgcttgggcaggagaaaagcgaacgccatgtgacggctactctcatgctgaccagtgacgcggaacgattcaatggaacgaatatcgaactgcgcctgcgtgagaagacagatgggtcaaacgtgctggtcatgcttgaccagaaggcacgatacttcttcaaacagggcgtggtggccgacgatgccggattcttcgactgaattggatgagcacagaggaaagcgaccgtaaggggtaacacaatgaatgagcagggtatgagccagaacggttggattgaaagtcctgaacacaacacggatgggaattccctgaccgcgttggacgctaagatcactgatatgttccccggggtcaccgtccgcaaggatctggtgaacaaggtcaagggcaatgcactggtgccttcatatgtgctggagttcctgctcagcgcatatgccacgaacaccgaccaggccagtatcgagtcgggtgtggatcgagtgcgtgccattcttgcaaacaactatgtgcatcgcgaggaagccaatcttatccagtcgaaaatccgtgagaaaggcagccataggattatcgaccgtgtacaggtggctcttaacgagaagaccgacctgtacgaggcgacgttctccaatctcggtatcagccaggtgattgtcgatccgagccttgtaaaagcttatccgaaactgctggtgacgggcatctggtgcatgtgtcagatcggttacgcatattccggcgacccgcgcgaagtaccatggcagttgctgcagctcaagcctgtgcagatgtcgcgtgatgatcgcgaaaactacatgcagcaacgttcgcaattcaccgatagcgaatggatcgatctgctgatgcagtccattgggttcaatcccgatctattctccgaccgggcgaaactgcttcatctggtacgcatggtgccgtttgtggagcgcaactacaatctggtcgaactcgggccgaaaggcaccggcaaatcgcacatctactcggaattctcaccgcacggcatgctcatatccggcggggaagtgacagtggccaaactgttcgtgaacaattccaatggacacttggggcttgtgggctattgggacacggtggctttcgacgagttcgcgggcgaggccaagaaggccggccgggacttggtggacatcatgaagaactacatggccaacaagtcgttctcccgtggtgtcgagacgttccaaggcgaggcgagcatggcgttcgtcggcaacacctcgcataacgtgccgtacatgctgaaaaactctgacctgttcgaagagctgccgaagcaataccatgatccggcgtttctggaccgcatccacttctacctgccgggttgggagttcgaacagatccgttctgagatgttcaccagcggattcggattcgtggtcgactatctggcggagattctgcacaacctgcgcgatgccgattacagcgaccggttcgaaaagtatttcgaactgtcttccacactgtccacgcgagataaggacggcatcaaaaagacgttctccggattgatgaagctcatctacccggacggcaaggccactcccgaacagatggaaccgttgctgcgttgcgccatcgagggccgcaagcgtgtcaaggaccagctgtgccgcatcgactccaccatggaggaagtcgagttcacttacaagcgtgtgagcgatggcgaagtagtcgccgtgcagacgttggaggagcttgactacccgcagttgtattggcgtgggcgtgtagctgagaactcggaagatgagggagaggcggaatcgtctgttgctggtgatgccgaggcaattgcgggtaatgaagccggtgcttctgagaacgtcaatgccttgcccgtagcgcggcagcaagaaacagctacgatgactccagtcgagcgtcttgcggcaaaggccgacggaaagcagtgggaactggtcgaaaaccaacgtggaatcacgtattacaaattgttcgggccatatttggctggtgcgaagaaaattgttgtagaggatgcgtatgtgcgtaagccttatcagctgcgtaatctggccgagttcttggaaatgctgctcagatgcaaaaatcccgatgaggatgtggccgttcatctggtgaccggacataatgatcctgaattcgtggatgcgcaggtaaatggtttggacgaactggtatcgacgttttcgcagttgggcgtgaaccttacctacgaattcagagacactttgcacgaccgttccattacttcggataccggttggcagattcttcccggccgcgggcttgacatcttccagaagttcattgatggagactggcttaacccattgttgcgccaccagcagcttcgccgcgttaaggaatgcaaggtcacgtataggcgaattgatgagaaatgagttgatttaggtctcaggaggtaagaagaaagacaatgatgaattggacggatgcggttcaggcgatttgtgccattataagtacaattggcggcattggtgcacttggcgttagtgcatggcaaatttggttgttttcctcaatgattcggatcggcgcattgacaatcagctaataaccgctttggaaaagtacaatgcgtatcccattaagtggagtgagcgggaatttaaggagaacttgtacaagcttgcttcgtgagtggtgtttgtggctttggtcgggagcgaggtttctgctgtttgccgtgtcgacctcccctcagtcgcctacggcgacagctcccctcggggaggggagttaaggaagcgcttaacgtgcgtggggcttcagccgctcccaatacgcccgaatcgcgccgaacgaatacaccgcgatcgcgacccaaatcactatgaacgccgcatagccctgcgcgcgcatcggttcgtgcagcaggagcacagccacacagaactggatcagcgggttgagatattggatgaaactcacggtcaggtaatggctgtgctgcacgccgtaggagaacatggccagcggaatcgcagtggccaggacggagaacgccactaacagcgcgaccatggccgccaacgtggcgaccaaacgatacgcgagcacgctgatggcattcatactggacagtgcgcgccagtacagcggcagcacgacccagccgatattggacacgagcggcgcggctatccccattcgcgtctgctcgacggtacgaaccgaagtcacgtctcaccaccatagcgactgatcacatgagtgtcccgcacctggtcacatggcatattggacttgctgatgatgaacagtaccggttattgttagagtcttttccacaggacacggagattgaacagatgattcggccttttctgagggcgcgaatcagattcgtaacgcagtggtttgccccagactctgttacggtgataataacttcatcgttgataagggagtcttcatggcaagcaatggcaacacggcatttcgtttccgagtcactttgcgccttgacgggcgtgaatgctggcgggagattctggtgccggcatcattgacgttcttcgatttgcatgcggtattgcaggaatgctttatgtggtacggcgagcatctgttctgcttctgcgccacatttccggatgggaagcaggtgcaagtggaagaattgtggggagaagagccctcataccatgaggcgaaatacgaacaatatatgccggtggagccgttgccggaagttcgcattgcttcggaaaccgagctgggcgacgtgtttcccaaggcgcgtaccgctcgctattactacgattatggtgacgattggatccatgatattaagctgctgcgtacctaccgcagcgtgcacgttgcggatcctcagctttgggatggggcgggggatgcgcctccggaggatgtcggcggggcgtatgggttcgagcggttccttgataccttgggcaatcccgaagatgaagaacatgatggcacggttgagtgggccgaggaccagatgtgggatcgtttcacgctgaaccgccatcgtgagcgtctgttccgttggcacaagcaccgtgacatgatgttgcatgggtgatgctgaacagatgatagccgaactgcattaggctactacgtcccacaccgtaatgtatgaccaatcattaggaggcccgtcatgactgcccatttcgacgagttcgaagaggagatgacctcccgcagcctggaacgagcatatgattacgtggacgagcataggatcggtgggttagaggaagtgtcggccggactattccacgccgaagtgcacggttctgaactctacgatgtcgatattcgacttcgtgacaacgatatcgtgttcgcatcctgcacctgcccctacgaccatgacggatactgcaagcatattggtgcggtgctcttgacgttgcgtgattacaaacacggcggtaatcatcagcagaacgtgacacacgatgcgatgattgcaaagcaggacgactctcggccagacatacccgtagcagcaaatcctctcgcatcgaaacctgaagtgttcaatcgagtgctgcaacatattcgagaacgagtgggactgcgcaaatcagaacggtggacgcccgctcagcatttctatctggtttggaatcaggacaaaatcaatgccatcgtgactgcgaatccggcaatcgcgagcggcatggaaccattgatgcccgaaagcaccgtggatcgcgtcatggaatctcccatgcggcgacatctcggcaaggactacggctggaaattcaaatggggagatgccgccataaacggcgtgatggccgtattcgaggaagcagaacaatcgaacgactatccgctggccatgagacgcatgtgcgcggctttgcgaaaaacagtgtggttcgcgagacaagtcgatgatgaagagggtacgctacagacatatatcgaacacctcaatgagcggatcctcgcttatacgtatgccgcggcaccaatcgttacaggcgagcaagcgcagcagatgctgattgcagcgttgggattcatacgtgatacccctatgatcgagatgctgttttggccgcacacgccgctggaatgcgtcatcccattcgcggatattcacgcacgaggtacggcggacatagaacagatggagcatcagccccgcgagatcggcacgacctcgttcatgtgccgcacctatgcgcagtccacattgaatgttgcccaacaattccttcatgacaagaagggggattccattgacggccatcgaacgaacctgaccgattacgattgggatgccgcgcaaaagcatgcggggtattgggagctcaccgttcaactgccgcatggcgagcttaccatgctggaggcctgctatgaacgactgaacgatgagaacggcatcaaacaattatatgagtactacgtcgctcacagtgattcagtggcggacgaacgttgcattcccatcctcaaatcgatggtcgacaaatcgggctggcctcaaagcgttcagaacatcctgcgcaactatcatgagcatgatttcggtgggaaagtccttgcacgactcatgactgaagagcgcctatccgatgaggccttgaccttagccgggcagcggccggaacttctgcgtgacttgctcaagcccatcagcctcaatcacagcgcggaagcagaacgactgatcagaaagcagctgccgctggatcgcgatccgtaacagggaaatcgcaacgaataacgattcgttgccatgtggatcgagcaatatcgcaacgttttcggactcgaccaagccaaggctctcgccaaggagatcatggcaaagtacccgagacggtatgcactcaaagaggaaatcggccgcgtgcataagtaacttacttatgccaaaacattctaacactactccgacgatgcctcgccaccgcggccacaagaatgcacgcaataccgaatacgcgcagcgcgccgcctttgacctgcgcattcgggcggaagaaaatacaccaccaaatcagatacagtgcatgaccccacatcagctgccgcgaacggctaaatctgccgagttcaccgagttcaccggccctattaagtccctcaactccatcaatcgccgtctgacccatcacatcacgctttcatacacattgccgattgacagtcttagaacacagtctagaactgtcatggcatgttcacgcagacaggggctccaacaaaattggctaaaagagaactcggcaacctataacaaggacgcgcccgtgtgcccttacgttcagctccgctcacgaatgaaatcgaaaatcacgtcgaagacctgctggctccagaaatcgtactcatgttcggcgccgtcgactagcaccagctgcgcgtccacgccgtgctcggccagccggtcgcgcatcttgacggattgatggtaggggaccacggtgtcggcggtgccgtgcaacaggagcatcggtggatactgctggtcatcccgcacctgcaggtaggggctcatgtcagccgcgcgctgacggacctcggcattgatgccggtctcatgggtcgcacccaccacggccgcgaacgggccgaaatagtacagccggaatggattggtctcatcgtcgaatgcgtcgacagcttcaagcatgtcggtgggcgggaagcagctgaccacgtacttcactgtatcgctctcatcggcattggtgccgtcctcataccgtggatcgtcggcggtcaaccccaccagcagcgacgtgttgccgccggacgacgtgccccagataccgagacggtcggggtccacgtgccattgacgcgcgtttgccctgagatagcggatggctgcttttacgtcctcgagatatgcggggaacacgtcgtggggatcgctcgaggcatcgcgatgattcaccgtagccaccacaaagccttcgcgggccaaagccgagagttgcgggatctcgtagtcgcgatgcggcgtggtccaggcgctgccttgcacgaatatcacggtggggtagcggcggttatcgtcatcgccggtggattgcggggcgatgatatccattaccagatcatcggccccggtcttgtacgccacgttgcgggtcagcgaggccagcccggcaagcgtgggattagatggaatatggatggcaccgtccgaaccagtgacgttttcggcggctttggatgagtcgatggtctgcatggaatccccctggttctgttgcaatacaggacatcatacagatgatacgaggccgatcgctgatgatcgcgcgactaccgatacaacgccagaaatacggaacaatcggagtctcctacgccctgcttggactgtccgcctgaatgattgcgattgttggtggcgagaaacgcgtgtatctcatccctagctaccgcgagcgctgcatcccgcggatagccgtaaatcccggcggaaatcagcgggaatgcgatgcttctgcagccgagcgacacagcaagctccatcgaattgcgataacaggcgcgcagcagttgttcctcaccggcatcaccgccctgccaaatcgggccggcggtgtgaatcacgtatcgggcggacaatgcgaagcctggtgtcgctaccgcgcaaccggtgagaataggggaaagtcggtcacaggcctcctgcatatcccgagctcccgccgcacggaaaatcgcgccgcacacgccgccgcccatcaacaaccgcgtgttcgccgcgttaacaatcgcatccacctgcatggtggtgatgtcctgatgcacaattcgcagtggcatgactgctatccctttattctttagaacgacggcatatcaagcgacggtgcttgacctgtcgggctagccgatgcgctgccatcgtcatgttcgcggaaccaatcgataacctgcgcctcgctcaccggcatcaagtcccatgcatccaatccgacgttcagagcctccggacgggccccatcgggcgaaagctgatgcgtgtgaccatacagcagctttcggccgtcaaacggcagggccttaccgctgaactttgccacatcgtcgggccagctgtacgacaaatcctcccgatatgggaagtgggacagattcactatgccaagtccttcgatttcgaccgtatcgttcggctcaaggctctcgaacaggttgagtgcgggccgatcttcaagccaccaatcatcgtgattgccgatcacaccatgcaaatgcttgcaattgagcgcgcgtagacagttcttcaaatgcgtcagtgacgtgcgaaaaccgatgtcgcccagaatccacaactcatcgtccggcccgaccatcgcattgatattgtccacgatcgctttgtcgtgagcatccgtatcggctgccgtgtggaacgtcggccccgagtccagcgtcgtctccttggcccaatcctcagcggctttgcgcccatgcgcgcgcagtatttcctcatagcttgagcgcgttggatcgaatgtcgtaaaacctcgtaacacggtgaccagcggatgtccgaaatgcgtatcggtggtgaaatacttcattgacggtcctcctgcggtgctgtccttgccgcaaccggtgcaaggacattacgaattactccatcctaagtccataagcgccatgtgaggagtcgcaaggatggccatcagcccgtgtctgttcgtgttgccataataaggcgtattgcaggggaacccgtgaaccaagccgataccagccgagccggtacggtgccattcgcgccgagaccgaatcaatcaccgacatgcgggttgagaaaggcataaggcctgacccttggagcctgttggccaacaccatcggagggagcaaatgatgacttttgacgccgccgcgttcggcccgatcaccttggaccatctgccgccgttcgcgcaacgactgcgcgaggccgccaacttggtctgggaggagggataccggcagccgttcctgcgcgagctgggcaacgggacgctcgatcgcgagcgcttcgcattctatctgctgcaggactaccgttacctaaacgactacgccaaggtccacgctctggccctcaccaaaacccaggatcccgaagtcatgcggttcatggccgacgtgcagaacggtatcttcaatgtggagtccgcgatgcaccgcaaatacatggcaagctacggcatcagcgagcaggaaatgaactcggttcgtcagtccgcgttcgcccgcgcctacacgtcgaacatcctttcgattgcatatggcaatcctttagtcgatgttctcgtggccgtgctgccctgcgcatgggtgtacgccgactacgggcagcgtctcgccgccgaattcacggacacgcttgattccaacccgtacaagagctgggtggacatgtacaaaaccgaggagttctggagcagctccgcatggctgatcgaacatatcgagcagctgaccgaacacctgagcgcagaacgcaaggacgaacttgtggacatcttcgtgaccggcgtgcagaacgaatacatgttctggtcgagtgcctacgacatgcagtacacatggaagccggaatgggatgtgtgaggaacacgatggatgagcggtgggcgcgtgccctgcgtgccaaaggcatcaatgtcggagagagcagtcaacacggctccagcgataagacggaaacagggaaattcctcgaatccaaaatcgttgcggctaagggcaagtcccgacaggcagcggcgaataccgtatctcacgccacaccattcaaagccaccggacataaggacggcatcagtcggcaggggaattgaccctgttgcggggctgtttcgagatgaatgggctcgggatgggtgcagccaatgggctactccagcttcaaggggctgattgcgtgctttccggaggtctatctccgtttcaaggggctgatgcccaagtagatggagggcaaaaacggcggaatgacgtgggcatgaggctgttattatgcttcgtccggaggatgaccagccccttgaaacggaagtagacctccggaacggttcagatcagcccctcgaaacgtgtgttgcggattaaaacgccggtaactcggttcagagaggtacattcggcgctttgcagaatggtaactgccttcgaagaggtactttgttcgcgaaaccatgagtataatcggtcagacaccaacgccattccgccgtctctgagctgcttccacttggctcggtacccctttgaacggagatggcattacgcaagaggccaaatgtacccctttgaacggagatatccaatatcgggctatgccgacatcatattgcgcgcagaaaatcacgaatatcagcaatttcctcgtcgcaaatggcgtgagccatgtcgggatactcgcgataggtcagaagcccggcccgttcaaggacctgatgggccgtctgctggtcgggcgcggggattgtgcggtcatacgcgccataggccagaaagaatcgggtaagggagtcaagcgccgcctgctcctcgcccatgaacgaagggctgagcagaatcgccgaatcgaacacggtcggatacgccttgaccagacggtacgacaggtagccgccttgggagaacccgataagaatcttcttacggtttgcaaacgccgaggcgtccagcaacgaggtcaccgcttcgccgaccgccgcgcattcccgttgccgttcctccacgccgcagccgtccggataccagtaattgccgcccatgtaaggccttggataggtggcgcggaatgagatgtaactcggcccggtctcaccatgtgcggattcagcgtgattgactgagtagtcggaatcagcgaaatcagaggaaccaacgggagcggacgaaactgataaatccgtatggaaccgtgccggcgcatatacagcgtcgagaatccgcaccatttcgctctcatcgttgccatacccgtgaaacatcaagaaaatcgggtcgtcgccgccggcattgattcggctcgtcatctgcagtcgcatcgtcatcacctcactcaacgagcttacatgcattcttacatgcattagacttgtatcgtttgaccgaccaagaacacgcaaggagcaatcatggggccgaggcgcggggcgctgaccgcaggcgagaaggtgcagttcaccgaccgcaagggcaagaagatcaccgatcagctggttgccggcggctccacacaaaccgagcatggcttgattctgcacgatgatgtgatcggcaggatcgaaggcacggtcatcctcaccgtacacgccaaacgagaggcgcaggtcaatcaggtctaccccgaaaaggacaggaacaagccgtggaagtcctcgcgcgccatcggcggctgggagtatgcggtgatgcgcccacgtctggccgactacgtgctctccatgccgcgtggcgcgcagatcatgtatccgaaagacatcgcccaggtcatccagcttggcgacattcgctccggcatgcgcgtgctggaatccggcgccggctcgggggcgatgagcgtcaacctgctggacgccgtaggacaggatggccacctgaccaccatcgagctgcgccccgaattcgccaaggtggcccaggccaatgccacgctgtactacggcgagcagccgcaatggtgggacctcaaaaccggcgacttcgattccgtggccgccgaactgcccgaacactggttcgaccgtatcatgcttgacatgctcgatccgtggaacaggctcgaacaggcctatcgcgtgatcgcccccggcggcgtgttggtcagctacgtaaccaccaccacgcagatgagccgactggccgaagccctgcgcacggccggctgctggaccgaaccgcagatccaggaaaccctcgaacgcacatggaaggcccaaggcctcgccgtacgccccgaccaccagatgatcggacacactggtttccttgtcatttcgcgcgccatggcccccggcttcgaggcactgcgcaaacgcgaccgcgtgaccaaggacacgtccaccgacatcgactccctcaccgaagagcagcgcgaagcccagatcgaagagctggaactgcgtgatatctccgatcacaaactacgtaaggtgctgcgcgatctcgaccgtcaggtcggccagctcgccgacaccgacgaataagcgccgaatgatgggtcgccggccgtttcgacggccctatactggaagcaatgcagggccgagcagcggttcgtgaagggagccacggatgggcatcaagctgaacaaggtcgccaaggcagccaaggaatatgaccatgtcctcatcatcatgaggcatgccaaggctgagccgttcggagacaagggcgatgtcgagcgtgagctcaccgagaaaggcctcaaacaggccaaagccgtgggcaagggtgtcgaagcgctgggattggtgcccgaccggatttcctgctcatccgccacccgcacccggcagacgctggatcgcatgctcaagacgttcggtgacaagccgatcgtcgattatcgcatcagcctgtatgacgggggagtgcaggccgtgttcgacgaactcgcccacgtcaaggacaagacccatgtgttcatgatcgtcggtcatgagcctaccgtgtccatcagcgcgcaatggctcgcctctgccgactccgattcggaacgtcttgatctgctgaatctgggtctttcgccggcctccatcgtgattatgggctcagataagccgttcgatgaatggcaggtgcacagtggcgaactgctcgccgtcatcaatgcgaaggacttcgactgattccatcgcgtcggctggtttccatggtccggtgccaccggtgatgatgaggcaagtccgccagcaatctggcggaccgttcgtgttttccggcatgaggtgtagtctcggctttacgcgatgacgcgaggccagtacatgatgctataagttccatctataacgacactctacgatcatttataagctgtgaatccgggcgttttgctaccctaagtcgggttacgaacgcttacattggaggattcatgtccactctgacttccgtctccggctttccccgcatcgggcagaaccgcgaactgaagaagatcatcgaaggctactggaagggcgccaacgacctggccgccgtcaaggccaccgccgccgaactgcgcgccaagcactggaagctgcagcaggccgccggcatcgacctcattcccagcaacgacttcagctactacgatcagatgctggacaccgccatcctcctcaacgtgattccgaagcgttacgagcgtctcgccttcgataaccaggaggacacgctcttcgccatggcccgcggctaccagggcgacaagggcgacgtgaccgccctgccgatgaagaagtggttcaccactaactaccactatctggtgcccgaagtcgagtcggccgcggagatcaagctcaactccaccaagccgttcgacgaattcaacgaggccaaggcgctgggcatcgacaccaagcccgtgttcatcggcccgtacacgttcctgaagctcgcccgcaccccggaagccaccgaactcgagctcgacaagggcctggtcaacgccgtggccgccgtctacgtcgaagtgctcgccaaattcaacgaactcggtgccgcatgggtccagcttgatgagccgtacctcgtgctcgacaaggagccgggcgatgttgaactcttcaagaccctgtacaccaagatcctgtccgccaagggcaacgtcaaggtgctgctcaacacctacttcggccacatcgccgacgtgtacgagaccgtcaacctgctcggcttcgacggcatcggcctggacctcaacgaaggccgcgaggagaacctcgaagccgtcgccaagtacggcgtggcctccaacaccaccatcttcgccggcgtgatcaacggccgcaacatctggcgcaacaactacgccacctccctcggcctggtcgatgccctgaagcaggtcaccgccaacgtggccgtctccaccgcatcctccctgctgcacgtgccgttcagcaccgaaggcgagaccggcatcccggccgaagacctcaagcacttcgcgttcgccgtccagaagctcgacgagctcaaggaagtcgccgccctggccgacgccaccgaggacgagaagaaagtctccgccgccctcgccgccaaccaggctctgttcgacggtacccgcgtggccgccgacccggccgtcgccgagcgcgtcggcaagctgtccgacgccgactacgtgcgtcagcctgcccgcgaggagcgtcagaccctgcagcgcgaggccctcggcctgccgttgctgccgaccaccaccatcggctccttcccccagaccaaggagattcgcgccgagcgcgccaagctgcgcaagggcgaggtcaccaaggaagcctacgacgagttcatcaaggcccagatcgacgccgtcatcaagaagcaggaggagatcggcctcgacgtgctggtccacggcgagttcgagcgtaacgacatggtcgaatatttcggccagaacctcaacggcttcctgttcaccaagaacgcttgggttcagtcctacggcacccgttgcgtcaaacccccgatcgtctggggtgacgtgtcccgcgccaacccgatcaccgtggaatggtccgcgtacgcccagtccaagaccgaccatgtaatgaagggcatgctcaccggcccagtgaccatcctcaactggtcctggccgcgcgaggacatcacccacgaggagcagaccaagcagctcgccctcgccatccgcgacgaagtgctcgatctcgaggccgccggcatcaaggtcatccagatcgatgaggctgccctgcgtgagaagctgccgctgcgcaagtccgactggcacgtcaagtacctcgactgggccgttccggccttccgtctggtgcactccgccgtcaagccgaccacccagatccacacccacatgtgctactccgagttcaacgacatcatccgcgacatcgacgcgatggatgccgacgtgatctccttcgaagcctcccgtggcgatctggtggtgctcgacgccattcacgacgcgcactttgagaccgaggccggcccgggcgtctacgacatccactccccgcgtattccttccgagaaggagatcgaggatcgtgtctacgagatccttgacaagatggatgtcaggaaggtgtggatcaaccccgactgcggtctgaagacccgtggcaacgccgaaacctggccgagccttgaacatctggtcgccgccgccaaggccgtgcgcgccaagctcgagaagtaggaccttatgaggcccccgctggcgggggctgtcgccacaggcgactggaggtggtaatgacgcaattccaaccacccccagtccggcatccgccggacagccccgccagcgggggcaacttcatacgtgtagtaaggaactcaatatgcattccccgatgttcactctcgaggtattcccgcccaagcgcaacgcgccggtcggcaccatctacgacaccctcgacgggctcgagggcctgaaccccgacttcatttccgtgacctacggccatggcacccactccgaccgcaccgccaccgcacgcatcgcccatacgatcagcaaggaatacggcataccagcagtcgcccacctcaccgctctgtactccgacaaggccaagatcgacgaagcgcttgacatgttcgaagaagccggcgtgagcgccgtgctcgccctgcgcggcgattacatcgacggtgagcaggcggtcggcgaattcaaccacgccagcgacctcgtatcctacatccgctccgtgaagccggatctcaaggtgttcggcgcctgctacccagaaggccattaccaggccgacaccatcgaccaggatatcgagaacctcaagattaaggtcgatgccggagccacccatctgatttcccagttgttctacgacaatgaggacttctaccgtttcctcgacaaggcgcgcgccgccggcatcaccgtgccgatcgaggcgggcatcatgccggtgcgtggcgccaagtccgtgcgtcgcatggccgagcgcaacgcctcgcgcattccggacaagctcaacaccctgctgaacaagtgggaggacgacatccagtccctgcgtaccgccggcatcctctacgcttccgagcagatcgccgatctcgtggcccacggcgtggacggcgtccacctgtattcgatgaaccaccccgccaccacgcgccgtatctggcgcaatacggaaccgttgttcctcggtacgcaaggttgacgcatatcgcggcgcggcgcatctcaatgcgtcgcgccgcgacgttaatctgctggcgaaacccagagttcccccagcggccgatgggtatcatgaacgtgcaagccaaccaaagcgatggaaggaagtccgttatgtgcactggtgtccgtttctccgatgatgagggcaacacctatttcggccgtaatctcgactggagtttctcatatggggagaccatcctggtcactccgcgcggctaccactatgacacggtgttcggtgcgggcggcaaggcgaagccgaacgcggtgatcggcgtgggcgtggtcatggccgataggccgatgtatttcgactgcgccaatgaacatggtctggccatcgccggcttgaatttccccggctacgcctcgttcgtccacgaaccggtcgaaggtacggaaaacgtcgccacgttcgaatttccgctgtgggtggcacgtaatttcgactccgtcgacgaggtcgaggaggcgctcaggaacgtgacgctcgtctcccagatcgtgccgggacagcaggagtctctgctgcactggttcatcggcgacggcaagcgcagcatcgtcgtcgagcagatggccgatggcatgcacgtgcatcatgatgacgtcgatgtgctgaccaatcagccgacgttcgacttccatatggaaaatctgcgcaactacatgtgcgtcagcaacgagatggctgaaccgacttcatggggcaaggcctccttgaccgcctggggtgcgggtgtgggcatgcatggcatcccgggcgacgtgagctccccgtcgcgcttcgttcgtgtggcctacaccaacgcgcattacccgcagcagaacgatgaagccgccaatgtgtcgcgtctgttccacaccctcggctccgtgcagatggtggacggcatggcgaagatgggcaacggccagttcgaacgcacgctgttcaccagcggatattcgtccaagaccaacacctattacatgaacacctatgatgaccccgccatccgttcctacgccatggccgattacgatatggattcctcggagctcatcagcgtcgctcgatgactccttcccggctcatgccccattcggaagggcatgagcgtatatagtggaatcttatggaatcgtcgatgttcaaacccagctccatggacctcatcagggcaggtctgcaagacctcgacaaggcccgcaccttgttcgaccagctcaaggcggacgacattcccgatgagcgatgcgccgaactgctgagcgtgctggcccacgcctgcgaccccgatgtggcattgagcaatttcgtggatatcgtcaacgcgatgcaatccagccagcgcgatctgaaacacgtcatccccgacaacaacgccctgaagcgtctggtcacggtgctcggcgtttccgacgcgatgggcaagttcatgcgcttcaagccgcagcttgtggaggccgcagcagtcgacaactgcaacagccatctgttcaatcacgcgcaacgccgtgcacgtctgctcaaggcggtcggcgcggacccggacgaaccggacatgcccgtcgcctccaaggatctggccgaagcggccacggccttgcgttccagctaccggaaccaactggccgccatcatcgcccaggatgccgtggcggacgacccgacctccatccaaccgaccatcagccgcgaactgtccgacctcgcggacgcggcgctcgaaggcgcgctggccatcgcccgtcacgaaaccgagggcagcgagcatgtgcgcttcaccatcatcggcatgggcaaactcggcgcacaggaactgaactacgtttccgacgtggacctcatctacgtggtcgaaccggtcgacaaggacgtggaccatcagacgctgattcgcgtgggcaccaagatgggcaccatgctgcagcgcgtctgccagtccgccatcatgggcgtggccgagcagccgctgtggcagatcgacggcggcctgcgcccggaaggcaaggacggcgcgctggtgcgcgtgctctcctcgcacaagaactattacgagcagtgggccgagaactgggagttccaagcgctgctcaaggcccgcccggtggccggcgaccccgacctcggccaggcctacatggacatgacccggccgttcgtgtggagcgcgtccaagcgcaagaacttcgtctacgactgccagaaaatgcgcaagcgcgtggaggatttgattcccgcacccctgaaggaccgcgagattaagctcggccgcggcggtttgcgcgatgtggaattcaccgtgcagatgctccagctcgtacacggccgcaccgacgaatcgctgcgctgcagcaacacgctcgactcgctgcagcgcctgtccgaaggcggctatgtatcgcgcaaacaggccgtgcgcatgtcccgggactaccgcttcgagcgcgtgatggaacatcgccagcagatctggtccctgaagcgcacgcacctgttcccggacctcggccgggcctcggtcggaggcctcgaaaagaagcgcgacatcgacgtggacgagttcaaccagaaccaggagctgcgccgactcgcccgcgcattcggcctgcacccggaagaactcgtcgacaagtatgacgacacccgccgcgaagtgcgccacttgcacctcgacatctactatcgcccgatgctgccggtcaacgcccagatggagaacgaccaaatcgtcctgagcgtcgaggcagcacaggagcgattcgaatccatcggcttcggcgacccggacgccgccatccgccacgtgcaggcgctcaccgccggcgtggggcgcgcggccaaaatcaaccgcatcatcctgcccgccgtcttgcagtggttgggcgagggccagaacccggacatgggcctgctcaactggcgcaaactggaggagaacttcggcaccgaatccggctatctcggcttcctgcgcgactccacctccgccgcccagcgcctgtgccacatcctgtccaactcgcgattcctgggcgacgcactcaacaagtcggtcgaatcgatcagttggcttggcgacaacgacaatctgcaggcccgcacgcgcgaggccttggacgtgcagaccggttcggcgctggaacgcttcggctcgaacatcaacgagttcgccacctccatgcgcgccatgcgccgccacgaaatcgaacgcatcggcctgtcctggatgagcggcgtaatcagcgattccgacagcctcaaagccatgaccgacgtgtacgacgcgatcatcgacgcctccctgacctgggccgtgcgccaccagatcgccgcgttcggcgtcgaaaccgcgccggccggcatcaccgtcatcgccatgggccgttacggcgggcgcgaagtgaacttcagctccgatgcggatgccatcctcatctaccgtccggcagacgacgccgacgacggccaagccaacgctttcgccaaaaaggtcgtggaagacctgcgcaacattctgcaaggcccgacgacgctggagcccaagatcgaactcgacctggacctgcgcccggaaggcaagaacggtccgctcgtgcgctcctacgcctcctgcgaggaatactacgaatcctgggcctcgacctgggagcgccaggcactgctgcgcgcccggtacgcagccggcgacgccgaactggcgcgagacttcctgatcaacatcgccgacccgctgcgctacccgaccacggagctgaccgaggccgagttgcagaacatccgcaagctcaaggcccgtatggaggccgagcgtctgccgcgcggcgtgcgtcgagaacgtcatctgaagctcggcaagggcggcttgtctgacgtggaatggaccgtgcagctcatgcagctccagcacgccagcgatatcaaagatctgcgcgtcaacggcacgttggaggcattggacgtgctggaagccaagaagctcatcagcgctatcgacgcgattcagctgcgcaaggcatggacgttgtgcaccgcggcccgcaacggcaactatctgtggagcgggcgcgccaaccaggccgatattctgcctgatgacatctattcgctgggcggcatcgccgtctacctcggctacggcgcccaccgcggccagcatttcgagaacgaccttttggccgtgatgcgcaagtgccgtgacgtctgccagaggctgttctacggtcaggttgacgaagatgcccagagcggcggtacgcgtatgcatgtgctggcaccgcgattggagcataatcgacgccttgcacagcggtgaacgccacaagcttcacattcattaggtcgatttgccgttcattaggtcggttacttctgtagagcggtgttggaatggcgccattccaacaccgtatgaagtgaaacactgacctaatgaacggcaaatcgacctaatgaatagttttttctgcatgcttcaccacgcaaattcagtaattcattgttcccaagggtgaacactccgtgaacgcggctgtccgaaaaatggcgtaagttaaattaggtcacacaagagtggccacctgaaaccacgagcgaaaaggtgagccttgtctgaagaaacacccatggtcggcaaaagcgttgtgacgctggacggcctgtcaacaaaccagatcctcgatattctgcataaggccgcatatattgacggccatcgtaaggaagtggctcacgcttgtgacggacgcgtgctcgccacattgttctatgagccctccacccgcacccgtttgagcttcgagaccgcaatgctgcgtctcggcggcaaggtcatcggcttcgccggcgcgcagctggcctctgtgaccaagggtgagtccattgccgacaccttgaagaccgtgtccaactatgtggacgtggtggccatccgccatccgaaggaaggcgccgctttggtggcctcccgcgccgcctccgtgccggtgatcaacgccggcgacggcggtcatatgcaccccacccagacgctggccgacctggccacgctacagtcgcgctttggccgcatcaccgacctgaccgtgggtctgtgcggcgacctgaccttcggccgtaccgtgcactccctgattgagaccctgtgccgcttcggtaacgtgcgcttcgtgctcatcagcccggacgagctcaagactccgcagtatgtgatcgaccgcatcaacgctacgccaagctgttcctatgtggaagtgcgtgacctggcctccgtgatgggcgacctcgacgtgctgtacatgacccgcgtgcaaaaggaacgcttcttcaacgaagacgactacctgcgtctgcgcgatacctacattctcgacgaagagaagctgcagctcgccaagccgtccatggccgtgcttcacccgttgccgcgcgtcaacgaaatcgccgtggacgtggacgatgatccgcgtgccgcctacttcgagcaggtcaagaacggcatgctcgtgcgcatggccctcgaaagcaccgtggtgggcgacgaactgcccggatacgaaccgctcaaccccaaggaggttcaggcctgatggaagtcaccagcatccagaacggtatcatcatcgatcacgtgccggctggcacctcgctcaaggttctcgactatctgaagatcgacccatccaaaaccaagctggcactcatcatgaacgccgactccaagcgctacggttccaaggacatcatcaaaatcgaagatgacaaagacatcgacctcgacgtgctcggcttcgtggcccgtcaggccaccgtggatgtggtgcgcggtggcaagatcgtcgaaaagaaacagccgaacctgcccgaacatatcgtgggagtgatctcctgtgtgaacccgcgctgcgtgaccaccaccgagcctggcatcaagcagatgttccacctcgtgcactccgaacggctcgaataccgctgcgactactgcgacgaggaagccaaactgtgagcataaccctacgcaacatcaaggtctggaacaccggcgagatcattgacctcgtggtgcccgggaccgctgccgcctacttcgccgacacttcctccgtggctgatggcgccgacatcgatgccgccggcctgaccttggctcccggattcgaggatccacacgtccacttccgagatcccggccagacctacaaggaatcgatggtctccggttgccgtgcgtcggcgtccggcggatacacgaacgtactcatcatgccgaacacgttgccggcattggacggccagaccgttaccgatgcttccgctcccggcgcgaaggaagttctggacgccggcttcgacaacgtcatcgacttcctgcagcagtacgatgccgcgcataatgtgaagctgccggtccgttacgacctgtgcgtgtgcgcgtccaaggatcgtgccggtcacgaggcaagcgatgttgccgattggctgaagtatgtgcccggctttgaggacgacgccaagacaccagccatgctggcccaccctgtcaccgcagtaagcgatgacggttctgccgtgaccccggagattctggatcaggtgctggagaacgtcaagacttccgatctgtatctgattgaacattgcgagcatcacgatacgggtgccgtcaacgagggaccggtttcccgcgaacttggcgtacccggcattccggaagacaccgaactcaagatcgtggctcgtgacatcgaagcggcccgccgcaccggtgtccacgtgcacttccagcatgtgagcaccgcgatttcgtttgaagctattcgtaaggccaaggctgaaggactgccgatcacttgcgaaaccgcgccgcattatctggcattgagcgatgaggcgttgctcaagtacggcacgttggccaagatgaacccgccgctgcgctctgaagcggatcgcaaggccaccatcgcggccatcgcggacggcacggttgacctgctggccaccgatcatgcgccgcatacattggaagagaaggaactcggattccttgaagcgcccaatggcatcatcggccttgaatgcgcgtacggcgtgtgccacaaggtgttggtggacggcggcttcatctctgatgagcgtttgattgagctcatgtccgtggggccggccgaactcatgggccatgcaccgaccgatgtggctgcgctggtcgaagactatgcggagcccgcgcctaccggtgaagacccggatggtgtgattgcgggggagcaggtggccgacgccgccgaatccggggcttcgcagcgtgaaggcgtcaaccggctgcttgatttcagtcatgtggacgatgccgatgcggtcgacctcgtggttcttgacaccgccgaggaatggaccgtggatcccgagcagttccactccaaggctcgtaacacccccttcggcggctggcaggtcaccggacgtcccctcgccacgatcatcggctccaagctgatgttcagccgtttgtagacaacacaaggagcagcatggatcgcctaatcgaagctatcgacaacacccagaaccccagcgtcgtgggccttgatcccaccgaggcgttggtgccgccgcaggtcgtggcgagctttgccgacgaggtacgcgattccgtggaatctccggaagagctcgaatccgctcagctggccgtcgcctacttcgaatacaaccgcacgattatcgacgccatcgccgatatcgtgcccgccgtcaaaccacagatcgccatgtatgaggcgcttggcccggccggcgtggacatctacacaatgacctgcgaatatgcgaaccagcaaggcctctacgtactcggcgacatcaagcgtggcgacatcggctccaccgcggccgcctacgcccatcacctgcacggcgtgggcgatttcgacccgtggcatgaggacgcggtgaccgtcaacccgtatctcggcaccgacggcatcaccccgttcgtcgaggccgccaccgaagcggacaaggacatcttcgtgctcgtgcgcacctccaacccgtcctccagcgaactgcagatgcttgatctggccgacggcacgaaagtctacgaacatgtggccgatctggtggaaagctggggtgccgagaccattggcgaccacggctactcccgtgtgggcgcggtggtcggcgccacacatccggaagaaggcaaggcactgcgcgcgcgcatgccgcacacgttcttccttgtgccgggctacggcgctcaaggcggtactgccgcggatgtggccggcatgttcgatgagcagggcagcggcgccatcgtcaactcgtcgcgcggcatcatcggcgcgtggaagaagagcggcaaatactccgaatccatgaccgccgacgaggcgcttggcttggtggcggacagcgcacgccaggcggcactcgacatgcgcgataatctgcgggttgccgtataccggtaagtagacgagtgtactcccgcccccgctggcggggggctgtcggcaaagccgactgggggtggccagtcgtggtcatagaaaaccaccctcagtctcgcttctcgagccagctcccgccagcgggagcaatgcagatgctgaataggaacaacatgacaactttcacccccactcatgatgtggttgcggaggcgactgcggccggattcttcccgccgcgtcacaacgttgaaatcacacaggttgcggaactgaccgaccacgtgatgcgattgacgttccgcgacccgttcatcgtctcccacgccaagcccgcccagttcgtcaacctgttcacgcacgacgacttcatgctcatgccgcgtccgttcggtgtcagcgaggtcaacggtgatgaggttagcgtgatcttcgccgtagtgggtcacggcaccgaacagctggcacagctgcaggccggcgacaccgtggacgtgctcggcccgctcggccgcggcttcaacctcaaggaagacgccaactacatcctcgtcggcggcggtcttggcgtaccaccactgatctacgccgcgcagaggctcgccgagcacgacgcctccttcgccaccgccgtcttcggctatcgcaacgaccacttcgccgaggaatacgtttcccggtacgcggactggtcgtggagcatcgatgacgccgaaggcaacgtagtcgacctgctcaacaagctcgaacaggacgacgatttgaaagcctacgatcgcaaaccgatcatcctgtcctgtggaccgctgccgatgatgaaagccgtggccgcatgggccgccgaacgcgacatccccgcgcagctgagcatggaacagcgcatgggctgcggctacggcacctgcgtgctgtgcaccatcgacaccgtggacggccgactcaaagtctgctccgacggcccggtattcacccgcgaacagctcggatgggggaagtgacgatgagcgcaaacaaccagtccgcgcagggcaacgacaaccacatcaacctgtacgaaccccacgtgtggaagcaccacactaaggtggccggcctggaatggaagaacccggtcggcaccgcctccggcacattccagtacgccgccgtccgctggttctacgatgtcagccagctcggcgccgtatgcaccaagggtgcatcgcccgtgccgtgggaaggcaacccctcgccgcgcaccgccgaatcgccggccgcgaacatcaacgccgtgggcctgcagaatcccggcgtcgaccactatttggccgaagacctgcccaagctcaaggccgcgggcgcattcgtcatctccaacgtcgccggacattgtgacgacgactatgccgaagtggtggaaaagctcgccgactccgacgtggacatgctggaaatcaacgtcagctgcccgaacgtctccgccggcggcatgagcgtaggcgccgacccggtggccctcgccaatctgatggaccgtctgcgcccattgaccgacaagccgatgatcgtcaaacttacgccgaacgtcaccgacatcaccgtgccggcccgtgcggccgtggaacatggcgccgacgccctgagcatgatcaacacgctcaaaggcatgcgcatcaacattcgtaacggcgagccgatcatcgccaacgtcaccggcggcgtatccggtccggccgtattgccgatcggcctggccgccgtataccacacacgcaccgtgctgccggacattccgatcatcggactcggcggcatcgacagcggcgagaaggcgctcgaatacctgtacgccggcgcgaacgccgtcgaagtgggcgcggccgcgctcttcgacccggtagccccgctgcgcgtcgcccgcgaactggacgacctgctggacagccgtcccgaactcgctgctaaactggccgcaggacagacctggaggtaaatcatggcagaaacactcgcacatcgtttcacggaattcctgctggaatccaatgcgttgaagttcggcgacttcacactgaagtccggccgtaagagcccgtacttcatcaacgccggcgcgttcgacgacggcaagaagatcgccacgctcggcgcgttttacgccgagaagatcagccaggccatcgtgcacaacacgattccccgcaacatcgacaccgtgttcggccccgcctacaagggcattccgctggctgtatccactgcgatcgcactgaccgccggccacaacatgaccgtcggctacacgttcgaccgcaaggagaagaaggaccacggcgacggcggctggatggtcggcaccccgctgaccgacggcatgaaggtactgctcgtggacgacgtgatgaccgccggcaccgccgtgcgcgaagtcatccccaagctcaaggccgaggcgaacgtggaagtcgtgggtctggtactttccgtggatcgcatggagaagaccaaggactccgacttgtccgccgtcaaggccgtggaagccgagttcggtttcccggtgcttgccatcgccaacgtacgtgagatcttcgacgccgccgccaagatgaagaacgccgacagcaccccgctgctcagccacgacatccagcagcgcgccgccgcctacctcgaagaatacggcgcctgatcgtcttcaatctaaaaccaaaagcgggcttgcgatcccgcttttttattacgattcatgagcagcagcaccatattaaggcaaaagctttggcaaggagcgtgctatgaactggttagttggtatagggctgtttgtgctcgtggggatatgcagttacttcggtatcgagcatcatctggacagcaaagcgaacaagttgtcgcaaggtaatgaagaagaccgccgagatgctgccgaattacgtgatatcgccgccaaaatcgatcacggcaagtattacccgatgctgtcttgatgctatctccgtttcgaggggctgatgtcgtggtttccagagatctacttccgtttcgaggggctgatgcccaagtagaagcagcatgaaaatggcggaatgacgttggtgtgatgccgctcatactcgggatatgacggatgaacagccccttgaaacggagatagatgtctccagaaggccaaatcagccccttgaaagcaagatagggttctaaactccggaaccgggtcgcctgtgatgaaaacccgcgcggcgtagaattaccgtaggttcgttgcattcgaacaaggaaggccgctatggggaacatcaccgacgatattcggcaacatttcgacactttcgccgaactgccgttcaccgaggcggacagcctcgctttgtcccagttggcctatgcgcgcatgccggataacgtgccgcgctatcacgagaatgcagagaccgccgacggcatgatcgtcacggttccgattcacgatttgctgcgtgccgaatgctatgacgacatgttcggcaaggtgtggtcgccttcgatgaacgtcgatctgttacgtgcgatgagcgagagcccacgctggaggaacctacgtgtaggcgcatacgtggacgaattcgatgccgaaaccaccaagcagttctcggcctgcgtgttcgaactgggtaacggcacgctctatgtggcttttcgcggtaccgacagctcgatcgtcgggtggaaagaggacttcatgatggcgttccgccgcccggtcgcctcgcaggaggccgccgcgtgttatctgaccgagctggctgaccattgggccgggccgattatggtcggcggccattccaaaggcggcaatctggcggtgtatgcggcggccaatgtgcctagcgagattcaggaacgcatcgcggtcgtatattcgcacgatggacctggattcgatgaggcgttcttcgatgaagacgggtacgtacgcattgcgtcgaagatccataaatcggtaccgggctcgtcgattatcggcatgctgtttgagactcgtgagcatgtggaagacggctatacggtggtcagcagcgatggagccagcatcatgcagcatttcgcattgcactggcaagtcgatcatggccaattcgtacaggctgatggactgacaagtagcgcgcaatacctggcacgcacgatcaacggatggatggcaaaatacgacgacgagcatcgccgcaagttcatcgaaaacctgttcgcgatcttcgaggccggcggatacgccacattcggcgacctcacttcgcatttggcacagtcactgccgattatgctcgccgcggcccgcaacattgatgtcgaagatcgcgacgtgatgatcgaagtgctcaaaggcttcgccgcgacagccgccacgtcggtaatctcggccaagtagtcggaggccatcaaactggttttgccagtcagtctcaatagcgcaagagccggcccctgagatactcagagcgtccggctcttacttccatttccccagcggggttggcttaatcgcagtatatctcactgctgaccatacctgttttacttactcctaatcaatgagtttgtagccgtgatcggcgactacggacttgagcttggtgaggtaggtttcggcggccttggagagcttggagcgctcgttggtgatccagccgaccagcatcgtctcatcggtgtcgagcggcacggtgacgatcttctcgttgttgaggtcgccgttgtcgatgccggtgcacactgtgtagccgttgaggccgatgatgaagttcaggattgtggcgcggtcggtcacgttgatttgcttgggggagtactccggccagaccgcttcctcatagaagtagaacgagccttcctcgccctgctcgtactggatgaacgggtatggcttgaggtcctccatggtgatgaccttcttggaggccagtgggttgttgcgcgaaatgaacacgtgcaacggcgcgcggaagagcggatggaattcgaggtgcttctcgcgcaggagcttgccgatcacatccttgttgaaatcggacaggtagatgatgccgatttcggactgcatgttggcgacctggttgatgatgtcgcgcgtacgggtctcgcggatggtgaactcgtattcgtcggacttgatggagttgatcatctccacgaacgcttcgacggcgaacatgtagtgctgggtggagacctggcacagctgcttgcgcggcttggcgtgcttgtaacgctcttcgagcagatcagcctgatcaagcacctgacgggcgtaggtcaggaattccgcgccgtccacggtcagggcgatgccctgcgaggagcgggtgaaaatctcgatgcccagctcgttctccagttccttgaccgacgagctcagggccggctgggagacgtacagagcgtgggatgcctcgttcatcgagccgcactcgacgattttgacgatgtatttcagctgcagcagtgtcataaggtctatttatagcctgagggatagtcgggagaagggtttatagccgtactccgagctgggcgagggattcgcgtgcctgcagcgcgttttcgaagagaagtccgtggatgccgacttcgttggctccgacgatgttcttggtggtgtcatcgaagaacacgcagttgcctgcggtcaagccaaagtggttcaaagccagctcgtagatgtcggcgttgggcttgtgcattttctccacgccggagaccaccgtgccctgcagcagttcctcgagacgcgggaatttttcgaatgccagatggaacgtctcgtgagaccagttggtcagcccccacacgccgtagccatgggccttgagatcttcgagcaactcgaccatgcccggcagcgtgcggggtagcgcgtcatcatagtgcgcgatgtaatattcaaagatcgcggcaagctcatcgccttgttcacgacggacgtcgggcaggatatcggccagatcctcgccggcatccatgcgatcctcgtaatggaaaaagccacatggatcatcgttggcacaaatacggttcaccacgtcgtcgggaaacttaccttcgaggcatgcgcgggtattccagtccagcagcacgccgcagaagtcgaaaatcacatcggtgatgggggagttggccatgatgctccttggtttgtgggctatcttcagtggttcctgtaattagtgtacgggttgattgcccagattggggtacatggagtttaattcttggctcaacctttgccaggcttttctctccctccgtctcggcttcgccgatccacctccctcatcagagggaggtcatattattcggcgaggccaagaactacgcaattacgtcggcgatggcttcgggaatcgcgcgaatcacgtcaccggctacaatcgggtgtccgagcgtcatgaagcgctgatgatgttcctggcccaccagttccggttcctgccagccctgctgctcggattccgaagcgattgcggcggccatgccatgcagataggccgcggaggcgacggtctccgctgtggtaatcaacgcatcctgctgggcgagcaaggcaccggtaagacctgccagcacatcaccggcaccagcggcggccagccatgccggcgcgctgccagaaacatagacatgatcctcgtccaccacaatggtcaccgcgcccttcagcagcacggtcgcaccggtcagctcatgcgcacgcagagcacaagccaacagatgaatctgcacatcgtcaacggtgtaaggctcacgcggctcagcatgttcggccgcatcctgccgcgcttccagccgattcagcaacttggccatctcgccggcgtgaggcgtaatcaccacctgccctggcacacgttcgggcaacaagtcaagtgcgccggcatccaccacgattggtggcatgtcataagcattgccggcatcgtcttcagcagacgcatcataatgcttgagcaaggccgctatggtttcgcgttgcatatccgtgccggcaccatcggcatcggcatccggtacaccggagccgacgacccaggactgtacatgtcccttgccgatcacggcttccggcagcgcggcaagcaccatattctgggcacgttccggtccgagatagcggaccatgccggtattcgcgcgtgcggccgcacgggacgtcagcaccgcggcacccggataggactgcgaaccagtgaccaatccgaccacgccgcgtgaatacttgccatcctcaaaacgaggaagacgaatcgagtcggcggcgaaggtgttgttcacgacttcgaccgcaggttcacgctcgtcaatatcgaatccaaaatcgaccaactcgattcgaccacacgagaacgttgcgggaggcagcacggcgcacggtttcatcgcaccaaacgtcgccgtgaccgtagccggaatgtacgggccgggcaacgaaccgtcgttgaccccgatgccggacggcgtatccaccgcgagcaccagcggaaagtcaccggacgattcgcggttgggaagagccggctcatcagggacctcaccgtcaagacccaaggcggaagccaacgctgcggggattccacgcaatgcgtcttcgatgccgatgccggtcatcgcatcgataatgagatgcgactgctgagccacggacaccgcggtttgcaggcgttcgcccgcctcgccagcggagaagccggacgaacagccgggaatttcggcggccgggtcaagtaccaagactttgccgccagcgcgaacgaatgcggcgaatccggcctcatgcaacgacttgcccacggctattgcagtaaccttgaccccctcctgcgccagagcggcggcggcgaacagcccatcgccgccattgtcgccggccccggcaagcagcacgatggaagtatcctcgagcgccagatcctcgtcatccagcatgccggcagcaatatgggctgtggcctgtgcggccatgcgcatcagcggcacgcccttatccagcagcggacgttccatatcccgcaccgtgccggagtcataggcactatgcaataacagttcacggcgatcgacgtcatcggcgtattccatggcagacccctttgcggtgcttacgaacgaacaccattgattttagcccgtttgccgagtcacgccgatagcaaacatgaacattcatgctgtcgtccaccttcttcatggcttccgttactatggtctgttggtttaacaggactctatacggaaagcagcaggtgaagcatggcgatcgaggcacagggtctggagattcagatcggcgcgcgcaccctgctccatcccaccaatttccatgtggccaagggagacaagattggtctggtgggccgtaacggtgccggcaagaccacgctgacccgtgtgatcaccggcgacatgctgccgaccgccggcaaagtacgtgtttccggcaagcttggctacctgcctcaggacacgcacgcttccgatcccacgcagactgcgctcgaccgcatgatgagcgcgcgtgacatcgccaccatcatcaaccgtatccgcaaggccgagaaggaaatgaccgacccggatccggacgtgatgaccaaggccatgaaccgttacgacaaggccatgcaggacttcgacaaggccggtggctatgcggcacagtccgaggcgatttccatggcgacttcgcttggcttaccgcaggaggtcatggaacagcaacttggcaccctgtccggcggtcagcgccgtcgtatcgaactggcgcgaatcctgttctccgacgccgatacgttgattctcgacgagcccaccaaccatttggacgcggactccatcgaatggctgcgcggctacctgaagaagtacgagggcggcttcctggtcatctcccactccacggaattgctggatgaagtggtgaacaaggtgtggcatctggacgcgcaactcggccagatcgacatgtattcactgagctggaaggcctatctgcaccagcgcgtggttgatgaggagcgtcgccgccgtgagcgtgaagtggcggagaagaaggccgaacgcttgatgaagcaaggcattcgtctgcatgccaaggcctccaaggcggtggccgcgcagaacatgatgcgccgcgccgagaaactgctggagaacacctcggaggcgcaaaaggccgagaaggtggcggatattcgcttccccgagccagcaccgtgcggtcgtacgccgattatggccaaggatatttccaaggcgtatggttccaatatcgtgttcgccggcgtgaatctggctatcgacaagggctcacgtgtggtgattctcggctacaacggcgccggtaagaccactacgctgcgtctactggcccacatcgaggaaccggacaccggttctgtggaatacggtcacggctgcaaaatcggctactttgcgcaggagcacgatacgttggatctgaacgccactgtattagagaacctgcaacacgtggctcccgagctcgacaacacacaggcccgttctattctcggctcgttcctgttctccggcgatgacgcgatgaagccggctcatgtgctatccggcggtgagaagacccgtctggccttggccacgctggtcacctcgcgcgccaacgtgctgctactcgacgagcccaccaacaaccttgatccggcctcccgcgaggagatcttgaaggccatcgccaagtacgagggagcaatcgtgctcgtcacccacgatgagggcgccgtcgaggctttgaaccccgagcgcgtgctgctcatgcctgacggcgacgaggacctctggaatgatagttatttggatctggttgccgaagaatagtcccatcttggctccctcgctgaggggagtgacctaacgaaaaacaaaggagtcacctgccatggccaccacaacaggcaagaacatcgccatcgtcaccggtagtgccttgggcctcggctacgaactagccagccagctcatcgacaaaggctggctcgtagccggcatcgatttcaacgccgaacgccaggccgagctcaccgcacaatggcccgctgattcctaccgtgcctacatcggcgacatcacggatgaagcgttcgtcaaggaatccgtggcggatatcgcctcacttggccacatcgaccttcttatcaacaacgccggtcagccctcgttcaaagtacccaccgcttacgaagccgccgacgttgacaaatgcctcaaaggtcttaaaggcatgatcctgtggaccgtggaaaccctccaggtctgcggcgaacgcgacgtgaaaatcgcccagatcatgagtaccgccgccacgcgtggcaatgcgaacgagagcgtgtattgcgccaccaagtggggtgagaagggctacaccaagagtctgcaggccgcatacaagggcaccagcgtcaaagtggtcgccatctatccaggtggcatcgacaccgccttctaccgcgacagccacgattacgtttccgaagacaagcagcacaccttcatgcagcccggtccactggctgaagtcatcctcttcaacctgatcaacgaggccaacctcaccgtcaccgacatcgaaatcaatcgcaacagctgactgtcaaaataatcagccaagagccaccggaacctcgtataggcgcccggtggctcttctgctatttactgcaagtgatgcagggctcggatgatggcacagcggtcctcggcggttccctcattagcgcacatggtggcgcaccagcgtgggttgcgcagggtttcggtgccggtggcctcgtccgtggagacgagcgtgtgcaagtcattggcgtattggaagtgcaggtggctgagcagaccgccgcacatcaaggccgaaccaatggtgacccgctgcttctgtccgccggacaggtgaaaaatgctgcgattcagcaagtgcttgataccgaagcgctcggtcacagccgtgatacggcgattaatctcttcagctggaagtcccatgttttcgacagggaagcaagttcatcggtgacgttcgcgttgaagtaccgggttttcgggttttggaatacgctgccgaacagcggggtgggccggtcgattggcacggtctccacgtccattccacacgtggtctggcggccggcaaacacgccatgggaaaacgaggggataagtccgttgaccacgcgcgtgtagctggtcttgccgcaaccgctcgccccgcacagcacaatgcactcgccttcaggaatggtcaacgtgacgtcgcgcaatgccggttctgtggcatggtcgtaggtaaaggagatatcgcgagaagcgatggttcccgcgaaagccgttgcattcgactgaggctgcttatctcccatcacatcacccccgcaatatccagagcgagcggcacggtgaccacaatcatgaccagccaatcaatcacggtcatgcgaattttcgtgtgcgaagtgtgctcgccctcacgtccgagccccttggtcagcgccgccaccgacaaatcctgcgccacattggtggcattcatcaattgacagatttttctctcgccaatctaacgatgattccacgcaaaggcaataccttttcacgaagttattagtgacttcaatcattcgtgtccataatgcacgcggaataacaaaatcgtccggcatcttcaagacactggacgattcaagaaactaacggtctgagccctcagagcccatacacctcgtgggcgaacttctcgaacacggggatcgaacgcttgaccttctcggtgtcgatgcagtaggccatgcggaagtagccgggcacgccgaagctgtcggacggcacgaggatcaagtcgtatcctttggctttcatgcagaacgccacggcgtcgtcctcgagcgccttggggaagatgtagaacgtaccgctggggcgcaccacgtcgaagccgatgccggtcagcgcatcgtagagcaggttcatgttcgtctcgtagacgttgaggtcggcggtctggtcgatgaccttggccacgcccagctgaatcgagctcggcgggcagttgtggccggtgccgcgcgagatctggcccatcatcggcaccagcagatcggcgtcggtcgcgtccgggttaacggtcacgtagccgatgcgctcgcccggcaggctcagtgacttcgaccaggagtagcaggttagcgtgttcgcgtagaagctggccggatagggctgggtaccgccgtcgaacagaatctcacggtacggttcgtcgctgatcaggaagatgtcgtggccgtattcggtctgcttggcggtcaggatcgcggccaggcgcttgagcgtgtccgccgaatacaccgcgccggacgggttgttcggggtgttgatgagcacggcctgcacgttcgggttgagcgcggcctcgaacgcctcgaagttgatctggaagttctcggtgtcggccggcacgatggtcagcttggcgccggtgcccttgacatacggccggtattcggggaagtagggggcgaaggtgatgatctcgtcgcctggcttggtcaccgcgcgcatcgcgtgggacagcgcgcccgccgcgcccgtggtcgggaagatgtggttgccggtgtatgccatgccgaaacgttcgttgaggttctcagcgaccgtctctttgaaggacgggatgccgagcgagggggagtagccgtggatggccaccgggtcgccgttctcatagaggtcaatcatggcgtcggcgaaggatttcggggccagcacggagggattgccaaggctgtaatcgaacacattctggtagccgatttcggcaccgcggctcgtggcatactcgctcagctcgcgaatcacggacttgccgccaagcatggccttgtattcctcattgatcatggcattctcctcgtatatacgtactgatgcttatcccactactaccaccatgttccgttttgtgccatctgccgcgccggacacacccatcgaacatgtgttcgaatttggtcgtgtgttcgggtattcttggggcaggctttgatacgtgcggtgtgatgcacgtgaaaaacagcgagacggaaggcggggattgtggcggcagcgcagactggcacaaagcgcgcaactggcggagcgggcgcgaaaaccggcaagggcaagaacggcgaagtcatcgtggaaaaggtgatgaccagcgactcattcctgagccgcgaaatcaaaaaagcgccgctcgtcgaacatgacggttcgctggtagcggacatctcgcacatcccaaacgacctcaagatcaccattcagggcgcacgagagcacaacctgaaagacgtggatcttgcgattccacgcaaccgcatggtcgtgttcaccggcctgtccggttccggcaaatcatcgctcgcgttcgacaccttgttcgccgaaggccagcgccggtacgtcgaatccctgtccgcctacgcccgccagttcctaggccagatggacaagcccgacgtcgacttcatcgaaggcctgagcccagccgtctccatcgatcagaagaccaccaaccgcaacccgcgttcgaccgtcggcaccatcaccgaaatctacgattacctgcgactgctcttcgcccgcaccggtattccgcactgccccgaatgcggcgagccggtcgcatcccagaccccgcagcaaatcgtcgacaccctgctcgattacccggaacgcacgcgattccagattctcgctcccgtggtcaagggccgcaagggcgagttcgtggatatgcttgaactgctgcgctccgacggttatgcccgcgcgctcatcgacggcgaaatgaagcagctgtccgacgacatcaaactcaccaagcagaagaagcacaccatcgaagtggtggtcgaccgacttgtggtcaaggacggcatccgacagcgcctgaccgactcggtggaaaccgcgctgaagctcgccaacggcagcatcgtcatcgacttcgtggacgaggaggaaggcagccccgcgcgccgccgcccgttctccgaacaccgcagctgtccgaatggtcatgtgctcgaactcgatgaggtcgaaccgcgcacgttctccttcaacgccccctacggcgcctgcccggcctgcaccggtctcggcttcaaactcgaaatcgacccggagctcgtgatctccgacccggataaatccctggccgacggtgtcattgagccgtggagcggcaccaagatgacctcccagtactacggccacatccttgaaggtctggccaaggaaatgggtttctccatgaagaccccgtggaaggatctgccggccgacgtcaagcacgacatcctctacggccatgacttcaaagtcaacgtctcctaccgcaaccgttggggtcgcctgcgcgaatactccaccggctttgagggcgtggtgcgcacgctgatgcgccgccacgacgaaaccgactcgcagtccatgcgtgaatactacgagtcctacatgcgcgaggtaccttgccaggtctgccaaggccgccgcctgaagcccgaagtgctcgcggtcaccgtggatggcaaatccatcttcgacgtgtgcgatatgcccgtagtgcacgaactcgcctgggtcaacgggctcaagctcgaaggctcggcacagatgattgctggcgaagtcctgaaagagatcaaggcgcgcctcggcttcctcaatgacgtcggactcgactatctgaccctttcacgcgcggcagccaccctgtccggcggtgaagcgcagcgcatccgactcgccacgcagattggctccggtctggtcggcgtcatgtacgtgctcgacgagccttccatcggcctgcaccagcgcgacaacgaacgactcatcgagaccctgcatcatctgcgagaccttggcaatacgctgattgtggtcgagcacgatgaggacaccattcgtcaggccgactggctggtcgacatcggccccggagccggcgagcatggcggcgaagtcatctactccggtccagccaagcacctcatcgaggcgaagcgttccatcaccggcgactacatcgcccaccgtcgcgaaatcgccgtgcccgccaagcgccgcaaggtgcgcaagacccagatgctcaaggtcgtaggcgcacgtgagaacaacctcaagaacatcgacgtgagcttcccgctcggcgtgctcaccgtggtcaccggtgtctccggctccggcaaatcctcgcttgtcaactcgatcctctacccggtgctcgccgacaagctcaacggcgcacgcatcgtgcccggcaagcatacgcgcgtcgaaggcgtcgaccaggtgcgcaaagtgatccacgtcgatcagaacccgatcggccgcactccacgctccaacccagccacctataccggcgtgtgggacaagattcgtgcactcttcgccaaaacccccgaagcacaggtgcgcggctacggccccggccgattcagcttcaacgtcaagggaggccgctgtgaagcctgccacggcgacggcacgctgaagatcgaaatgaacttcctgccggacgtctacgtggaatgcgagacctgccacggcaaacgatacaaccgtgaaaccctcgaagtcacgtacaacggcaaaaccgtttccgatattctcgatatgcccatcgaagaggcagccaacttcttcaaggcctacaccggcatttcccgatatctgaagaccttggtggacgtcggcctcggatacatccggctcggccagcccgcgcccaccctgtccggcggtgaatcgcagcgcgtcaaactcgccaccgaactgcaacgccgttccgacggcaagaccgtgtacatcctcgacgagccgaccaccggtctgcacttcgaagatgtaaacaagctgctcaaagtgctgcaatccctagtggacaagggcaatacggttattgtcatcgaacataatctggacgtgatcaaggaggccgattggttgattgatcttggtccggaaggcggtgacggcggcggcaccatcgttacgcagggcactcctgagcaggttgccgaatgcgacgaatcctggaccggcaagttcctgaaaccgatgctatagcctttcaattacggctgaccttgggtgggctggggtgcgcgtcgctggacacgctccgggctgctcaggccaagtctttacggtccagcgacgcacaccccagcccacccaatcctgaatcaattatctgctgctacttgcgagaggaggattatgacgaacgatatcgagcggcatagtccggacgagtggcgcaagactgcggcggcgttgatgccggaaagctctagtgcaggagccgaagaaagcgcagctgcggcgaaggtgaatgcgaatggggcgcctttgctgggggattctcgtgatctgtttcgacctaagacttcggacattccggccaagcctggtgtgtataagtggcgcgatgggcaagggcgcgtcatttatgtaggcaaggccaagaacctgcgcaataggcttaccaattatttccagccactgtatctgctgcatccgcgcacacagaccatggtgcttacggcacgcagtctggagtggacggttgttgccactgagttggaatcgttgacgcttgagtacacgtggatcaaggagttcgatccgcggttcaacgtgcagttccgcgacgacaagacctatccgtatctggcggtcagcacgggggagcaggttccccgcgtgtgggtcacgcggtcgcgcaaacgccgcgatactcgttacttcggcccatacgccaaggtgtgggagctgaggcacagcctcgatcggctgctgcgcacctttccggtacgtacctgcaccacgaatgtatttcataaagctcagctgaccggccggccctgcctgctggcctctatcggcaaatgctcggctccctgcgtgaatcagattgaagcggacgaacatcgacggctgtgcgaacaacttgttggcgtcatgaccggatgccttggacggccgtatatcgcgcagttgacccgcgacatgaaagaggccagcgccgagcttgaattcgagaaggcggcccgtctgcgcgatcagattcagatgctggagaccgtggtgcagcagaacgccgtcgtcttcgatcaggacgtggacgccgacgtgtttggctttgccagcgacgaattggaagcttccgtgcacgccttctatgtgcgtgccggctcgattcgcggcgaacgcaactggagcgtcgaacgggtcgaggacatcgctgatactgacttgatggcggatcttctggtgcaggtgtattcggatgaggcagggaatgaccacccccagtcggctgcgccgacagcccctgctagcgggggcgaaaatgcagccgtgctcccgctggcgggggctggcacgcgaagcgtgactgggggtggcgctgcaaccatttccaccagtcgcgaagccatcggctccacgcagacccttacggccacggacgcgattgctcgcgcccaggccacccgcgaacgcaatacccgtcaggaaaccaccggccgcgtggatctgctggctcccattgcgcctgtgccgcgcgaaatcatcgtgccgatcgaaccctcccggcgtgcggaactcgaaagctggctgaccgaccagcgcgggggagcggtgaccattcgcgtggcctcccgaggcgacaagaagcagctcatggatcgcgccaacgagaacgccaaccaggcgttgcagcgcagcaagatgagccgtatttcggatatgggcgcacgcacccaggccatgaacgacgtggccaaggccctgggcctgaaccaggcgccgttacgcatcgaatgctacgacatttcgaacaccgtgggtggcgccttccaggtggcttccatggtggtgttcgaggacgccatcgccaagaaatccgaataccgtcgtttttccattcgcggcaaggacgggcaaggagcagtggacgatctctccgcgctctacgagacgctgacgcgacgtttcaagcatggtaatatcgccggggattccggcgagagcatcgacgcggagcagcgcgcggccaaggctgagcaacagcaggaacaatccgtatccgatgcaaatggcaccagcagtacgacgccggcagcaattaccgatgcctcatcatttgccgattcgtctgaagtggtccagcagaacacgaatcgtcatcactttgcatacaagccgaatctcgtggtggtcgatggcggcaaaccgcaggtcatggccgcggccaaggctctcaaggattgcggcgtggatgatgtggccgtctgtggcttggccaaacgcctcgaagaggtatgggtgccggatgatgactatccgatcatcctcaaacgccagtccgaaggcatgtacctgctgcagcgcgtacgtgacgaatcgcatcgattcgcaatcacctaccatcgccagcagcgccgcaaaggcgcgctgcgcagtgcgctcgatgagattccgggtattggagagagctatcagaaacggctgctcaatcatttcggttcggtcaaagccatgcgtatggccagcgtcgaggacttcgagcaggtcaaaggtgttggccacgccaaggccgaggcgttgtatgccgcgttgcatgacgagtaggtagactcaactgattctcttcgggacctcccctcagtcacttcgtgacagctccccttctgaggggagccagtgcagcaacagcccatgacagtttcccatacacagtcgcgataatctccttcccggagccagtgccgtcactcggcatgaattttcgattacgaattgcgtagcgtgaccacaccacgacaagatgtcggctagcataggagaagatattcaaggaggggatatggccaaccatcgctgcgcagtacttggcaaaccgattgcgcattctctgtctccggtactgcataacgcagcctaccggtcgctgaatctcaatgattggctgtatgacaagcacgaggtgggggaggatgaccttgatgctttcctcaaaggtcttgactccacttgggccggcctgagcctgaccatgccactgaaacgcaccatccagccgtacggcaccccggagaacctgtgggccaaggagctcagggtggccaacaccgcggtgttcgactggaatgacatcaccgatgatccggcctggcctcacggaaagccggccatcaaactgtacaacaccgatgtcatcggcatccaactcgccttcgaccatatcaaccgggagctcggcaaccatcatgcgggcgatcgcgccggcacggccctcatcatcggcaacggcaacaccgccacctcggcattggctgcgtgctgcatgatgccggagatcggccatatcaccgtcgccgcacggcatcccggtaggaacgccggattgaagcccgtggccgaaaaattcatcaacacgcataacccgtacgacgaaatcgaactgagcgacacgtcggccctgctcaacgccgcacgcaccgccacctatgtcatcaataccattcccggtttggcggcaaacggcatcgcgaatgtcatcaacacagacagcgaatcgcacgcggaaccgtattctggcctgttgctggacgtggtatacaatccacgtcccaccagactcatgcaagcatggcggtcccacggtggccgcgccattggcggcgaggaaatgctgctgtatcaggcacttatccaagtgctgctgatgaccggcatatgggacgacgatccgcccagtgacgccgacaagcggttgcaaggcaccaccaccgaggacgatcatctggaaatcgcgatgcgcaacgcgctcgaggaggcattgtgatgagtcagccatcttccatccacgattcggaaaatcaggtcgacacccattccgattccgccgctgcggataatcagcccaatccggccgacgcattcgaggtattgctcatcaccggcatgtccggcgcaggccgttcccgtgccgccgattcggtggaggatatgggctggtacgtagtcgacaacctgccgcctaaattgctggttcctcttgtcgatatgatgacgacctccgggtcagacagcggcgttcacaagctcgccgcagtcattgacgtacgttcccgcagctactttgacgatctggcagccgtgctcggccacttggatgatctcggtgtcaaaacccgcatccttttccttgatgccaacaacgacgtacttatcaaacgatacgaatccgtccgccgcccgcacccattgcagcacggcaaccgtcttatcgatggcattctcgaggaacgccatctactggaaaatctcaaagagcgggccgattgggtcatcgacaccagttccttgagcatccatcagctgtccaccaagctctacgagacaatgttgggatccgggcccaccaccgtggccgtgcacatcttcagcttcggattcaaatacggcatgcctatagatgccgatttcgtggccgatgtccggttcctgcccaatccattctgggtgcccagcctgcgcgagcttaccggagccgacaaacccgtcgccgactatgtgctgtccagcaaaggcgccaaggaattccttgattcctatgaacgcgccattgaaacggccatcgaaggatatgcccaggaagacaagcactttgtgaccattgccataggttgcaccggaggccagcatcgatcggtcgcgatgagcgaagaactggctcgccgattacgcgcacacggcctgaacgtcaccgtttcggcacgggaacaacaccatcgacgctcatcctgagtgaccacactgcgagaaaacaaagcccaaaatatatatcaaacgggttcggttgtccaccagattaggtatcacagaaagccgatggcttccgactgcttgatggccgaggcgcctaaggcattgagaagaacgggactgtaggaggttggatctttggctcttctggacgatgttaaaagcgagttggctgcctttgaaggtgactcgcctgccgcgatcaaggcccaagcagcggccatgattcgttttggcggtggtttgcgtcctgtgcaaaacgcgtatgtgattcaagccgtatttacctcattggatgcagccgagtggcttcaaaacaccctgaagaacgtattcggtcatgaggcagaggtcaatcacctgacccgccagactccgaatggtccggtggaaacctatgtggtgcttgtcacccgcaacgtggtggctcttgcgctgcagaccggtctggtcgaccgccgcaagcagcaggtgcgcggacttcccgccgaagtggtcaacggctccatcgcccagatcaaggccgcatggcgtggcgctttcatggcccgtggcttcctgtccgaccccggtaaagcaagcttcctggaaatcgcctgccccaccgaagaggccgccatggccctgtgcggcgtggcccgtcgtctcggcattcaggccaagcatcgcaccctgcgcagttccgaacgcgtgacgctcaaagatcccgacgccatcgagcgcatgctcaagctcatgggtgccacccgttccgcccgcgaatggaccggcaaacgttccgacggcgaagcccgcggcaaggccaatcgtctggccaacttcgatgatgccaatatgcgcaggtccgccaaagccgccgccgaggccagcgagaaggtgcagcatgccttcgaggtgctgggcgacaacattccggacaatcttcgtcaggccggccagctgcgcatcgaccacgtggacaagagcctcgaggagctcggcaagattgccgaaccgcagatcaccaaggatgcaatcgcaggccgtatccgtcgactgctccagctcgccgaaaaaaccgaaaaggcccgggccgccgaaggacggtaagaggcaaaccgtcaagatcgtccagcatatgcaacgacttacgaaacaccgcattcagtcatcagacgaatgcggtgttttgttctggaatgcctgtaatatgcaaagtggcaaaaattggccactttgacgtgaaattcgtcaaggaaaggatattcatgaagacactcaaggaccttggagatctcaagggcaagcgcgttctggttcgcgctgatttcaatgttccgctggacggcaccaccatcaccgatgacggtcgaatcaaggccgctctgccgaccatcaagaccctgcgcgaagaaggcgccaaggtcatcctcatggcccacctcggccgcccgaagggcaaggtcgtccctgagctgagcctggccccggttgccgcccgcctcggcgagctgctgggcaccaacgtgccgctggccaaggacacctacggtgaggacgcccaggccaaggtcgccgccatgaacgatggcgacgttgtgctgctcgagaacgttcgcttcaacccggaggaaacctccaaggacgccgccgagcgcgccgcctacgccaagaagatcgccgccctcggcgaggccttcgtttccgatggcttcggcgtggtccaccgcgctcagggctctaactacgacgttgccgccgatctgccggccgccgcaggtctgctggtcgagaaggaggtcaaggccctgtccaaggccaccgagaacccggagcgtccgttcaccgtggtgctcggcggttctaaggtctccgacaagctcggcgtcatcgagaacctgctcgacaaggccaaccgtctggtcattggcggcggcatggtgttcaccttcctcaaggccaagggctacgaggtcggcacctccctgcttgaagaggaccagcttgagaaggtcaagggctacatcgagactgccgagaagaacggcgttgagctcgtgctgccgaccgatgtcgtcgtgaacgccggcttcccggccggtgacaccccggttgccccggaggtcgttgccgccgacgccattccgtccgacaagatgggtctggacaccggcccggattcccagaagctcttccacgacaagatcgtcgactccaagaccgtcgtgtggaacggcccgatgggcgtgttcgaggttcctgagttcgctgccggcaccaaggccgtggcccagggtctggtcgacgccaccgcagccggtgcgttcaccatcgtcggtggcggtgactccgcttccgccgtgcgcaacctcggcttcccggaggacggcttctcccacatctccaccggtggtggcgcttccctcgagttcctcgagggcaaggagctcccgggtctgaaggtgctcgagtaagttttattctggctcccctcctcgaggggagctggctcgcgtagcgagactgaggggagttacggcgatgtcgggctcccctcagtcagctttgctgacggctcccctcgctgaggggagccaaggaacgataatgagaggggaaatcatggcgtccaagcgtattcctttggtagccggcaactggaagatgaacttcgatcatctggaagccacgtactttgtacagaagctggtatggctactgcgcgacgctcatttcgacttcaagcgttgcgaggtcgcccttttcccgtccttcacctcgctgcgcagcgtgcaggtgcttgtcgaagccgacaagctccgcctcacctatggtgcccagtcggtatccgtgaccacgcaaggcgcctttaccggtgacgtatccgccgatatgctggcccaccttggctgctcgtatgtcattgtcggacattccgagcgccgtaaataccatcctgaagacgatgccaatatcgtcgatcaggtgcgtgccgtacttgccgccggcatgcagccaatactgtgcgtaggcgaaagctacgaggaacgccgtaagggcattgagctcgacttcgcagtcggccaggtgcgtgatgtcacccgtgatctttccgatgaggaagctgccaaactcatcgtggcctacgaaccggtctgggccatcggcaccggcatggtcgccaccccgcaatccgctcaggacgcagccaacgcgattcgcgatgatttgaagaccacgttcggtcaaaaggtgtcggacagcgtacgcattctgtacggcggctccgtcacctcaaagaacgcggcagaactcatctcccagcctgatgtggacgggttcctcatcggcggcgctgccttggatgtcgaggaattgtccaaaatcgcccgtcttgcgctgaaaacaacatcttcacgatcgtaatacaccggttttccgatatgtgcgctatgcttatcaacagtaaattcaactcggaggtaccctgtgaccgctcttaagatcacgctgcaagtcatcgtcgtgctgctcagcttcgtgctgaccctgctcatccttatgcacaagggcaagggcggcggtctgtccgacatgttcggtggcggtctgacccagaatgccggcacctctggcgtcgccgaaaagaacctgaaccgctggaccgttatcatcgctctcgtatgggtggctctgattatcggcctcgacatgatgaccaagttcaacctcggctgattgattttgtaaacttttcacgacccatgaccgacataccggtcatgggtcgtagtttttccatcgttcatggcttacaaaggagtgcactatggtcactatgaaccgtaacaaagtcgtcattgtgggcaccggacaggtcggtgcgaccacggcgttcagcatcgttacacatggtctgtgcaatgagctcgtgctcatcgatcattttgccgccaaagctttgggggaggcccgtgaccttgacgatggtagcgagttccaagatcgtcacgtcaaggtgcgtgccggcgactatgccgattgcagggacgcggatatcgtcgtcatcaccgtgggccgcaagccgccggccaattccaaccgtatggccgagctcggcttcaccgtcgggctcgtgggcgaagtggtcgacaatgtcatggcctcgggctttgacggcgtaatcgtcatggtttccaacccggtcgacgtaatggcctggtacgcatggaaacgttccggcctgccgcgcacccaggtgcttggcaccggtaccgcgctcgatacctcacgcctcaagaccatcatcggcgaggaaaccggccttgatccgcgcaatgtgggcggcttcgtgatgggcgagcatggcgactcccaattcaccgcatggtccaccgtctcgctcggcggcaagccgttcgctcgcttcctggctgacaaccaagaccgcttcgcctccgtatccaccgccgaagtcgaggaaaagacccgtacccgcggcaacgaaatcgtggcggccaagggcggcaccaacttcggcattgcttccaccgtggccggcatagtgcagaccattctgtgggatgagcgtcgcatcatccccgtctctacgctgctggacggcgaatacggcgaacatgacgtgttccttggcgtgcccaccgaactgcgtgccaatggtgccaatgaaatcgtggaactggaactaagcaacgaggaaatggccaaaatgcatcactccgccgaactcgtccgagaccattgcaagggactgctgtgaccacaaccatcaagacgacaactcgccccgaactgttggtcgccgacctcgacggcactctattgcatgacgccgaggtctttgaggatcgtttcatcacccagcgcagcatcgacaccatcgctcgggctcacgacgccggcatgaaattcgccatcgccaccgcgcgaccggtgagtaccggactgcagtttgccgagaaactgcccgttgatgctgtgatctatctcaacggtgccctcatcgatttcgacccggccaattccgatttcgatatgctgacatccgactcatcacagcagcgcgagaatcatctcattaaaatcggtttctcctcacagcgcgcttgcgaagtctgcctgtttctgctcgaccgtatgccaaacctcaaaatcggcatcgtgatgaacgacgtgcgctacaccaacttcgatgtgcgcgtgtattggaagactcaggctttccaatacacgaacttccatgacgttcctgatggaatcgcagacaaaatcaccatcttccctgaaccggaacaatggaatgaactgcgtgcgctgattccgccggacttcgacatctccatcagcgaaggcgtgatgtggatgctcatgaatcctcaggccaacaaggagcatgcgctgcgcttgctgtgcgatcgtctcgatgtcccgcttgagcagactgcggccttcggcgacgatctcatcgacatcaatatgatgagcgaatctggcagaggagtggccgtggccaacgcgaatccaaaagtgctgtccatcgccgacgagatttgccctcctaacaacgaggatggcgtcgctcagtggatcgagtcacagcttcgataattgctgtgccgttcgaacactgtaaacacgccaaaaattgaacacatattgaactaggcgtatgctttgaaccattgttcaacaagacaattgaacttccggttggaggcatgggactatgagcgtatcggtgtttgcggaacgactgcgcaatgcgatgaacagtagggaattgaagcaggttgatctggtgcacgccgccgaacgccgcggtgtcaagatgggcaaaagccacatcagccaatatgttgcgggcaagaccatgccgcgagaggatgtgctgctgtttctggctgacgaacttgatgtcgatgcgaactggcttcgtggccgatcctcagaaacaaaattgaactccgacgcacaacccgcttcccatattgacacaccgagcggagctcccacgtcggcggaaacggaaattcctgctgctcgccgccgtacctttggcaaatcacacaagcttgatgacgtgctctacgatgttcgcggcccagtggttgatgaggcggcccgcatggaacaggccggcacccacgtactgaagctcaacatcggcaaccctgcaccgttcggcttccgtacgccggacgaggtcgtctacgacatggcgcaacaattgcctgaaaccgaaggctattcggcttccaagggcctgttctccgcgcgtaaggccatcatgcagtatgcacagctcaagaacattccgaacgtcaccatcgaagacatctacaccggcaatggtgtcagcgagctcatcaacctgtctatgtccgcgctgctcgacagtggcgatgaggtgcttgtgccatctccggattacccgctgtggaccgcctgtgtgaatctcgccggcggcaccgccgtgcattacctgtgcgacgagaagtccgactggtacccggatatcgacgatatgcgtaagaagatcaccgatcgtaccgtggccatagtgctcatcaatccgaacaatccgaccggtgcgctgtatccaaaggaagtgctgcagcagattgtcgacttggcgcgtgagcaccagctcatgattttctccgacgaaatctacgatcgtctggttatggacgggctcgagcatatttccatcgcttccatggctccggatctgttctgcgtgaccttctccggcctgtccaagtcgcatatgatcgccggctaccgcgtgggctggatgattttgtcgggcaacaaggccatcgccaaggattacatcgagggcatcaatatgctcaccaacatgcgcatctgttcgaacgttcccgcgcagtccattgtgcagaccgcgctgggcggccatcagagcgtgcacgactatatcgtgcccggtggccgtatccatgaccaacgtgattacatctatgacgcgttgaactccattccgggcatcaccgcggtcaagccgaaggccgcgttctatatcttcccgaagattgatatcaagaagttcaacgtacatgacgacgagcagttcgccctcgatctgctgcatgacaagcgcattctcatcacgcgaggcggcggcttcaactggcacgagccggatcacttccgtatcgtctacctgccacgcatcgaagtgctcaaggatgccaccaacaagctctccgacttcctcagctactactggcagagctgattttttcaatgccgacgagtccactaatgtgcactcgtcggcatatctttatatgaatatcgatgtcgacgaactgtacggcaccgtaaccatcgatgcaccccgtctttctgcaaatctacatcccattgtcgatgccatcgactgagcgtgggggcgtaacgccgaaactaataaaaatatgagcccgagcgggaccgtctccacatgaggtctttatcgcaccaaaatacctgcaatgacaatgaggccggccttgattcgtatggtttgcaggtataaagggtcgatctggagtacctgaacagcgctattcgggctcaactccatagattgcaggtataaaggtgcaagttagagccgattgtgcgccgtaacttgcacctttatacctgcaacgccgctaacaagtaccgaaatacctgcaactgaatcgggttatgccaaggtgaaggcgatgatgaacgcagtggcggacagtacagctgttaacagcaggtagaatatcgcggccttattctgaaaaccagctgaattagccgaattatgactgttgctcatgctgcctgtggtagccataacggttgcgatggccgagacgagggaaaatattggcagcacgtacagcaaaacggctagtacgatgagaggtcctgaaccggtgcaaaaagcaataagtcctgcattgttcgttgctgccagcgcggggcaaaaatcggtatggccgccagtgccgtaattgtaggtcagaaaagtgattactgcccaaaacaggccaagaggaaccgatacatgacttacggcagacgcattgatactgataacccgaaacagcttatgcagagatacaggtcgtatatcgcgaatcgtcggcagtgctgaaccaacgttatctcgtggaatatcgatagagatgagatgcaccagcgcatatgccgcaagtccaagtccacaagcgatggtcacaccgccggtggaattgacctcatcggacaccgagtattcggtgacgagcaccggcatcacgccaatttgccacacgagcagcagccgcgtcaccagagtccaaccaccgcgctcggaggcagacttatccgaacccgtcagattagtcagatcggctatatgctgctgctggatactagtgctgttgcgcgaataggcggcaagtatggcgtaaaccaaccatgttgccgcatgtatcgcccacaacattacaattttggtattcgcgctcagcaccaatatgaacgcaacggccactgccgcaagaaaaacacagatgaccgtgcgaagacgatgacgagcaaagccctgtactcctgcaacagtcagacaaatgattgcaacgacgctcagcgcagtcaccgccagaaaccacagtggcgaagtgacgcaggctccgtaatcaccagttgcctggccagacagataataagtcattctgccaatcgtcggacagttcggatgcagcatcatgccgccccagattcgctcatatagtggcgcgaacgatacgccagcaccgctgagcgccgcaataatcgccatcaccatggccggaatcaatccaagctcgcgattccggtcggtttccgttatctgcctatcactggtgttcatgacgcaccccgccttatgccgttatcgatgatgtcagtatgactatagtagatgagcgaaggccagcagtatacaggaattctgtatgccgctttataggcgtgatgctgtgacagctaacatgacaaccgctatcactggccgaccgtcaaactccgtgcacaccgggcaactaccgccggggagcatcggcgatgccgatggcgagaccaatgatggccggcataacccagccgagttggtattgctgcagggggagcatggccagtgccgcgtccagccaaccgatggaaccgccgaagacggcggccaggctggagatgcaagtggcgaaggaggcgatgcccaccagcagtacagtccagaagtagacacgcgggaatcgcgcgccaagcttcttatgggtaagcgccagcaacaccagcacaatggcaatcggatacaacgcggacaacaccggcacggagactttgatgatcgcgctcagcccggcgttggacacgatgaagctgaacacggtgaagatgatctgccaagtgcggtagctcagcgttcgtccggcgacggtctggaatcgagtatggaagtaggtggcgcaggtgcagatcaatccggtgcatacgttgaggcatgcgatgacgaacacgacgccaaggaacgcggtgccgaacgtgccgaacagggaagaggtgaggttggtgagtacggtggcacctgtgtccttggccggttcgatagaagcgatggcgccagacaccacgcccacataactcagggcgccgtagatcacgataagcagcacgccggtgccgagcccggcgtaggcggtctccttctgcacttgcgattcatcatcgacttgctgggcgcggatattcgcggaaatcacgatgccgaaataaagcgcggcaagcagatccatggtctggtagccgtcgaggaagccgcgtgcgatttggtttgtggagtaatcgcccatcggtttggccggggtgccgatgccgtggaccaggcatgcgatgaacagaaccgcgataagcaccagcagtaagggtcccatgaaccggccgagcactttggagagtttctcaggatgttgggcgaacaagaaggcaagcgagaagaacacgagcgagtagataagctgggctagccagtcataggaagtcggcacgaaaggtgccaccatcatttcgaatgaggtggtggccgtacgcggaatcgcaaaacaggggccgatggtgagcatgatcgccacgccgaggaacagggcaaatttgggggagacccggccggcgagcttgtcgaagcctccggcgaaagtgaccgccagtacgccgagaatcggcaggccgaccgcggagacgatgaagccgatggctgccggtatggtcgcggagccggcctgcgcgccgacgaatggtgggaagattaggttgcccgcgccgaagaacatcgaaaagaacgtgaaggtcatgaccaaccgttggcgtgcgacaagtttgttcaaggttctcctctttctctgtgtgccagctacccactctagcaagttcgcctctagtgtggtcccttcgcaccatccatatgccgtcatccactccctagcatacgttttctagattattttctccatcatctggaaaaacgtacactgaccgacagtaagcgtacatttttccggagaaggcctgaaatagtctggaaaaccgtacgctcagggtgagtaagatccgaatatgtcgtaacaaaagaaggacgaagccctatccaatacgcaaaaagccccgaccggttggggtcggggcttctgtgagctaaccagttaatgcgctaggcgcatcgactaataatctcaggcgttcacgcggtcgatgccggactggacgtcagccagcacggaatcccaggacttgatgaaggcggcgacaccgtcggcctccagcttgtcggtgacgtccttgaggttgatgcccagctcagccagcttgttgatgacggcgtgggactcctcgtaggtgccctcgatggacggagcgccgttgccgtggtcggccagagcgttcagggtcttctccggcatggtgttgacgatgtgcttagcaacgagctcgtcaacgtacttgcagtcggagtaggcagcgttcttggtgccggtggaagcccacagcgggcgctgaaccttggcgcccttggcagccaggtcggcccaacgcggatcctcagcgaacttcttctcgaagagctcgtaagccaggcgagcgttggccacagcagccttgccctccagagccttggcttcgtcggagccgttggcttccagcagcttgtcgacagcggtgtccacgcgggacacgaagaaggaagcgacggagccgatgtgcttcaggtcgtggccgttggcgtcagcctgggcgatgccctcgatgaaggcgtcgatgacctgctcgtaacgctcgagcgagaagatcagggtgacgttgacggagatgcccttggccagggtggcggtgatggccggcaggccttcgagggttgccgggatcttgatcatggcgttcgggcggttgaccttctcccagagttccacagcctgcttggcggtgttctcggtgtcatgggccagacgcgggtcgacctcgatggagacgcggccgtcgacgaagtcggtagcctcagcgatctcgcggaagatgtcggtggcgttgcgcacgtcggtggtggtgagctcgcggacagcggtctcaacgtcaaccttgccgagctccttgagctgagcgtcgtacggaccgacctggctcagggccttctggaagatggacgggttggtggtaacaccgaccacgttcttgttggcgatgaggtcctgcagggagccggactcgatgcgggagcgggacaggtcgtccagccagatggaaacgccgttgtcggacgtacgctgagttgcttcagtcatttatttctccttatattccgttatggaacaaatcttgttaagccctccctcttagtgagggagggcaatgaaatcacttggcggcttcgacttcggcgatggaggccttggcggcttccaccacgtgctcggcggtgatgccgaggtcgatgaggttctgagcaccgtcgccctgcagaccgaactgctcgatggagacaggcttgccgtaggaaccgaggtacttgtaccacggcatggcaacgccggcctcgacggagacgcgagccttgacaccggcaggaagcacggcctccttgtactcggcgtcctgctcctcgaaccattcgagggacggcacggagaccacgcgggccttgacgccttcctcagcgagggtcttggcggccttgacggccagctggacttcggaaccggtggccatcaggatgacatccggagtgccttcggtgtcgaccaggacgtaagcgcccttgcggacaccgtccttggccttggcagcggtctcggcgagaaccgggacgccctgacgggacagcaccatggcagccggcagcgtgttcttcttctcgaagaagtagcggtaggcttcggcggtctcgaaggcatcggccgggcgaacgacctcaagctgcgggatagcgcggaaggaagcaaggtgctcaaccggctggtgggtcgggccatcctcgccgacggcgacggagtcgtgcgtccacacgtacaggttcgggatctccatgagggcggccagacgaacggcggaacgctcgtagtcggagaacatgaagaaggtgccgccgaacggacgggtgtgggagcccagcaggatgccgttggtgatgcaacccatggtgaactcgcgcacgccgaagtgcagctgacgaccgaactcgttgcagaccggccactgcttggtggcgcactcagccggagcgaaggtggcagcgcccttgaggtcggtcttgttggagccaccgaggtcggcggagccaccccagagttccggcatgacagcggcgatggcattgagcacggagccggaggcgccacgggtggcgacaccctttccgacctcgaaggtggcctcaaggtcatcgatggccttgtcgaagccttccggcagctcgccggccttgatgcggtcgtacagggcagccttgtccgggttggccttgcgccatgcgtcgaacttctcgtcccattccttgtgggcctcgagaccgcgctcagcaaccttgcgggcgtgagccagagcctcttcgtcaacatggaagttctctgccggatcgtagccgaggacttccttgaggccggcaacggcctcggcgcccagcttggagccgtgagaggacggatcgttggtcttgcccggggtcggccaagcaatcagggtgtcgaccttgatgagcttcggctgatccggagcagcggcctcggccttggcgataacgtcggccagaccctcgacgtcctccttgtaggagccgtcgggctggatgaagctgaactcgtcggtgtaccagccgtaggcctggaaacgcttgagcacatcctcggccagcaccaggttggtgtcgccttcgatctggatgcggttggcgtcgaagatcacggtgacgttgccgagcttctggttggcggcaagggcagcggcttcgccggagatgccctcttcgatatcgccttcaccgcagatagcccagatcttgtggtagaacggggagtcttccttcggggtttccggatcgagcagaccacgctggaaacgctcgccgtaggcaaagccgatggcggaggcgaagccctggcccagcgggccggtggtcatttcgataccgggggtcaggccgtactcggggtgacccggggtacgggtgtcagcgccaccgcggaagtgcttgaggtcgtccagggtcaggccataaccggagaagtacagctggacgtactgggtgagggaggcgtggccaccggaaaggatgaagcgatcacggccctcccagttgggatcgttcggatcgtgcttgatgaaatgctggtacagcgtgtaggcgatgggcgccagggaaacgggggaaccggggtggccggaaccggcgttctccaccgcgtcagccgaaagggccttcgccatcttgatggcgcgctcgtcgagctcggtctccttgaattcggtcatggattactttccttccaattggtcgggccgcgtatccggcttgtgccgggcgcttgacgccctcacattgcgcttaccatgctagcgatggtttgcgacgttatggtgcaattttggcgtgttttggtagtttgtgttctgttagcgttcacaattcacatcacttcgccgcaaacgaacgcattagcactcgaaaccaatgagtgctaatacaatgagagcagattgcatactgcagatgtacatataaggaggcgcgcatgacgcaatcacgtcgcatgctggtactgcgcgctgtggtggaagattacattcgttcgcaagagcccgtaggctccgcggcattgtccaaggaacgcgatttaggcgtcagctctgccaccattcgcaatgatatggccgcattggaagatgaaggctacctgattcagccgcatacgtccgccggtcgcgtacccactgaaaagggataccgttattttgtagatcgactggctacggttgtgccgctcagcgaagctcaacgccgcggtatcaatagtttcctatccggctcggtcagcctcaaggacgcactgcaacgttccgcacgactgctctcggaaatcaccggtcaagttgccatagtcgcatcgccttcattatccaaggcgacgttacgccacgtggagctggtaccagtggccatgagcactctacttgccgtggtaatcaccgataccggtcgcgtggcacagcacggactgaccgtctcggccatgcccacggccgacgacatcaaccgcctgtccagtgcagtcaatgaacaatgcaacggtcagtccttatcatccgcatccgaaaccgtgcgcgcccttggtggcggcaccggattcgagacagtgcgggaggcggccgacgccctggccgacgccttcgcatcgatggcattggacgagcgcgccaacgaattgtatatgtccggcacatcgcatctggcgcattcccgttctctgaccgatctggcaccgctcttcgacgcgctggaagagcaagtggtgctcatgaaactgatgagcaacctcagcgaagagccaagcgccactggcgtaggcgtatccattggctccgaaagccacacgcctgaactcttgcatgcctcggtggtcagtagcggttacggacgcagtacttcgcccgtagcgaacgattcggaacgcaacgagacatcgcccgatcaggacagcgccaacgaacccattgcttttgtgggatccatcggcccaacccatatggattatgcggctaccatggccgcggtcagggcagtggcaaggtatctcactttttttgtctcggaaagcggctccggcgactgaccgcaggctatggcacaataacccgcagaccaacgaatacaaaggaacagacaagtggcagattattacgagacgctgggcatcgaccgcaacgcgagcgacgacgagatcaagaaggcgtaccgcaagctcagccgtaagtatcaccctgatatcgcgggaccggagttcgaggacaagttcaaggaagtgaacaacgcctacgatgtgctgtccaatccggataagcgccgtatgtatgattccggcgttgaccccaacgatccgaacgccggtgctggcggcttctccggcgcgggattcggcgatatgggagacgtattctccacgttctttggttccgcattcggtggcggctcacagggcccggtgccgcgcacacagcctggacgcgatgcgctggcttccgcttccatcgacttgaaaaccgccgtattcggcggcacggcgcacgtcaagatcaatacgttctccctgtgtcaggagtgcggtggctccggcgcacaaggcggcgcccagccggtcacttgcccggactgccatggacagggcttcatgcaaaaggtcgtgcgcactatgctcggccagatgatgacctccgctccctgtgagcgctgcgagggtcacggcaccatcatccagaatccatgcccgagctgcatgggtcacggccgcgttcgcaccacgcgtaatgtgggtgtcactgtgccggccggtatcaacgacaatgctcgactgcgcttggccaaccagggtgaagtcggtgagggcggcggcgctgccggcgatttgtacattgatattcgcatcaaggcagataagcagttcacccgcgacggcgatgacctgcattgctggattcaggttccgatgagctgggccgtgctcggacacgatctgtccattgatacgtttgacggcgagcagaccgtatccattccggcgggctgccagcctgaggatacggtgacgttgaagggtctgggcgttaccaatattcgcaataaggatgagcgcggcaatctggttgcccatgtgaacgtactgattcccaccaagctcagcgagtccgagcggggactgattgaacagttcgccgcctcgcatgattccgatgccacgcacgtctcccaggcctcccgtccgcaaaccggtcagaagaagggattctttagcaagttgaaggacgcactgagctgagagcgggttgaaaaatagccgctttgctttgcgggagtagggctgagcggcttttttcgttttaaccggttttaacggtttttaacctgtttttacgaaaaatgtgggcaaaatgtgggcaaaaattgagcccctgaaacccgctccctaacccgaaagtcccatcggactctcggagtctgaggaggccaggcggctctttatcatggcagttgatgcgattatggcgatttacatacttgccggatacactgtggttatggatcaggaaacccgtatggaaaagaaactggacaagcacgaaaaacagttgctgaatgactataggagaattgttcccgacgcgcaatggaatcggccatcgcatatgtccgctcgtagtctgtgggaagcctgctcatggaatcatgatgcagggccgaccaccgcgtccaacaagatcggtgcgtgactcatgccatcgtggggagagaccttggacgaggtgaacagccgggaacagaacggcgaggagtccgtgctggatcacatgattcgggaacgcatcgccgcgttctccgcaaaacgtggcagaaacgtgatctgctattattccagctggcttcagaagccgaaccgtgatgacaccggtatcaacgatctggacatgaacggtttcatgaacgccgtcaaggacatggaccggtcaaagggacttgatctggttcttcacacgccgggtggtgcggtggcggccaccgaatccgtcatatcctatctgcatggttgctttggtcgagacatggttgcctttgtcccacagcttgctatgtcgggcggaaccatgatggcttgcgcctgccgggaaatatacatgggacgtcagtcatcgattggcccgaccgacccccagttcggcggcaccccggcaagcggaatcgtggaggagtttcaaaaggccgtggaatcggtaagaaaagacccgggcatggccgccctctggggcactatcatcgggaaatatcctcccgcctacatcggcgagagcgagaaagccttgagggtatcggctgagattctctcgaagagtctaaaggaaaacatgtttgcggagaatccggaaaaggtagatgaggtcgttagccgtcttacctcccatgcggattcgggcatgcatgacaggcatttttccatcgacaccgccagaagcatgggacttatagtcaagacgcttgaggatgatgacgtcatacaggatatggttctttccatccatcatgtgttcatgattctttttcaccaatcgaatgccgtgaagatcatctccagcggagatcatgcttgggtcataaacgcatccaattgatcgcgcggatacgcgaaaaccgcccctccgtccagcgttgctgctgggggaggggcggttttcgtttcagtgggcgttttagccttcgactgcttcgcgtagtcgcgtgccgaacggtgcccggttgttgccgaccttgagggccggcaggtcgtggccgatggtcgccttggcgaccatgttcaacgcgaccacgtcgtccgggtccttgagcgggtggagcctgctcccgtcgaaatagtgcaagccgttttcgtcgttaagttggacgatgcatgcaagaccgttcatatcattgttctccttgttggttgttcctgtgatgaagctgcggtctttcggccgcaggtagccgaggctggctggcgtctcccacatgcggcgcgcgttcatggtcgctcccgcgttctgggcgagcacgtacgggctggctcccggtctcacgtcggccaggaggatcgccacgtgagtgcaggggtagttggcgtcgccgccccagaggatgacgtcgcccttcaaaccgggctgcgaggcggggatgcgcgtgaagtgccggccgatccaatcggtggtggggaatcccgtgtataggctgccggcccagcccgcccatttgccggagcgcgcggtatggcagtcgctgacgctggcacccatgaggtcgacgcacaatgcgcagaaaaggtcccagcattgcgccccgtaggctccgtcgaggtcgcgccatgctcccgtgttggaggcggcccattggtcgaagcggctcacttggactcctccacgtcactggcgtcggtatcgttggcggcgtttgcggccatgagggtgagcacgtccgggtcgatgcccgacgcgtcgagctggatcgcggtgggcatgagctccgggtcgatgctggtcaggctggattgcgcgccggccttgacgcgatccgtgatccgctggccggcgaccgcggcggcggtaatgttgttgttgcgccaccacgcgtagatgctggtgatgacggcgatcacgcccgtgatggcggtggatacctggtcagaggtgaatggcagctggctgatgccggccagactcaggccggtctggacgaccgagaacagctgcacgatcaaaagcacgatggccttgactcgctcctgcgtcagcttcgccatgttcgaggtggccttgtggtcggctttggcggtgtttgccatgattgatctccttctgttgggttttggtttgatggtcacgaccgtttcacgcggtcgaggaggtattgttcggcggcgtcgacgacccagcagtccgcgttgatggccttgagcttgtcgagttcgtagcggatcgcctcgctgtggtctcgcgtcgaatccgacatgagggtcagcagagtgttcttgatggtgtccttctgcacctcgtgctggttcgcctcgaaccggtcgagacgttcaccgagttcgcgcgactgagcccaatgcgcgttcatctcgctgtcgaacggcagttttccgggatccacgtgggagtagagccatgtggagaacgtgggaagcgtgtccggccatagcttgccgatgacggccatggcgagcaggagcagcggacttgacatgagtccgcctatgatcgcgtcccaatccatcagtcctccgacccttgggcggattgccatgtgatgatgtccgagattcgaggcagattcgcggcgggcacctccgtgcagagccgggtctgtaaatccgtgaaaacaacggtttcggcatcaacgccggcgaaatcggctctcaattgccgttccgggtctatccatgactggcttgacccgtcgtcggaatggtcgaaccggagtccgagtcggagcatttgggcgaggatgccgtcatccggtgggcgtaggtcgatgacctgcatggctggttccgtggtcttgtctggcatgatgtttcctctcgaaaatcagattgcgtaccagtggaaggcgacgggctgccggtcgatccactggttggtgtcggttctgacgaatcggatttgggcagtcgtcgttgtgcagtcccatatgaccgggcggaacagttttccttgtggttcaccgatgccgtcccatgggccgggggtgatgctcagggtggggatgtatccgagattgtgcgtgatgacggcaacgccgttcacgttcgtggcgcccttgaactgacccgacaccggacaggcgaggtggttattgctggagtacttggggtagtggaggaaatagagatccgacgacgccagcttcagcggtgatgcatacgagtcaagcgtgacggtctgaccttcttgtttgatggaccatacggttcggccgttgtcatagctgagcacgctgccggcgttcagttcggagactttgttgccaatattgtcaatcacctggaaactgccgcttgtggacacgagcgcgctgtatccgacgaacgacccgttttttatctgtccgactctcacgccggaggaggtcatcctgatgcacgcctccaatgagccgacgcgggattgggcgttggtggcgttcccgttcgccgtgttcgccgtggtctgcgcctgtttgatgctgacggtcaggctttccttggtctgcgtgaccgtcgtgctcaggttctgcaccgtggtcttcgtcgcgtacgtctccgacaccgagcttttaatgctcgtcgcggtctgctccacgctgctcttggtcgcgtacgtcttcgaagcgtccgtcttcgacaggtacgtgttgctcacgctggtcttgaacccgttcagggattgttccaacgcggtcttcttcgccagactgtcggacttggtctcgtagttctggctgaccgtggtcttgaacccgttcagggactgttccagcgtactggcgcggctgatggccgtatccgccgtcgtctgcgcgttcttggcctcggtgacgtcgcgtatgctcagcagggtgcaataccagccggtcacatccgcgctgccattcgcgccgcccacctgaagccatacgatcgcgtcctcccgcgcggctttgggaatcgtgaggtccccggaccattgtttccatccggactgggaggtcggcactctgaacgccgtatcccagtggccgttaccgttagattcatggtagaagcagccgagggctgcaggtttcttcgcagtggaatcgtgcgccatccacgcgctgaaccggtaggttcgcccgcgtctgagcactttggacccgttggtcgtgtcacgcgcggagagcttgccgtacgtcggtgccggggcaccctccggtgctcccgatgcggatagggtcaggccgttcgtccagccgtcgggattgccgagcgtgcgatcgcattccgggttgcgtatcagctccgcgccgttcgccaacgcggtctccacgttccggttcgtctgcgtgagcgacgaggtcaatgagtcggccttggccgtcaattggccgatcgtgctcgtgtgccccttgagcgtggtggcctgctccgagacggtggtcttcaaaccgttcgcggtggcctccacgctcgcggccttgctcaaggcgttgttcgccgtggtggccgtggagttgattttcgcggtcaggctctcattggtctgcgtgagttcgctcttcgtgctgtacgtcttcgacgcgtccgtcttcgacaaatacgtgttgctcacgctggtcttgaacccgttcaggttctgctccaacgcggactgctttttcagcgaatccgccttggtctcatacgtctgggaaacactggttttgaacccgtcgagagtctgttcgagtttgctggcgcggctgatggccgtatccgccgtggactgcgcggtctccacgttctggttcgtctgcgtgagcgacgaggtcaatgagtcggccttctgcgtgagttggccgatggttgtggtctgccccttgatggtctgtgcctgttcctgaactgttgtcttaagaccattagcggtctgttcgacagtagtggctttgtccaaggcgctctggccgacgcgctgcgcttcggtgaccttcgcggtcaagctctcgctggtctgcctcagttccgatttcgtgctgtaggtgacggggatgtccgcgtcgagcctgtccacgcccttctgcgcgccgttcgcggtgctttgggcctttgccgcatcggctatcgccttcgtgatgtcggaatccttgatcaggctccacgcatacgtttccccgtccgtgctgccccaacggtaggagtagccggtcgtgaggtcgtagtagacgtcgcccgcatgctgcttccgcagctggtcggtggcccacgtcgaggcgggcgcgttcgacgcggtaggcttctgcgatccggtccacgtctccaccgcgttgtccgcgatgttccgcaacgcctccaacgcgctcttggtcgcataggtcttctcgaccgtgctggtgatcccgtccgaggtctgcttcagctccgacttgctcgcgtatgctgcgtcggaatccttcttcgacaaatagttggtttcgagggtggttttgacctcgccggcggtctgcacggccgtggaggactgggtgagcgccgactgcgcgtcatcgtatgcccggtcggcggtggtcttgaccgagttcgcggtctgcacggcctgcgttgacgcggagagcgcctggtccgcgtgctcgacactgttggataccttggtctccacctcgcccaacttggtcgtatgccgttctacgatcgccttcgtgccatccaattccgtggcgagtttgtcggccttcgacgcggcggaggcggcagtggattgcgcggtgcttgccgcgtccttggcctccttcacgcctttgacggcctcgttgcgcaccgactgcatgccgtcgatcgcggattgcgccttcgaatccgcattggcggccgcgtccttggcctccttcacgccgttttccgcgtcctctcgcacctgttccatgccgtcgacggccgcgttggccttggatatggcgtcgtcggccttctgcgagatttccgtggtgtcgatgagcggcatcctgttgccgtgctggtccaccagcacgagcccttggtcaccggcctgctggccggccagtattccagtgccgtcgcccatcggccagtagctgctgccagcgttggaggtcatgcgcattcgggcgagcctcaacgcttccagtccgatgccgagcgcggggtccccggacggcacgatttcggtatgcactgccatgtgcggctccttatctgatagggtcagtcatcacgtcgaacgtgagcttgacttgcgcggtttcgtctccgctcatttgcatgaggcgggtctggtagatgccgtcgttcatgccggggaagccgtcgagcgcgatctccatgcgttcgccgggccagaacgagcccaaagggttgacgggcagtccggtcgaatcatggtcgttcacgttgacttcgcccttgatctgcatgagtggcagccggttcgcgttcaggttcccgcgtgctgaggcggccagctgctcggccttgtccgtgtccgtgttggagagggtcatctccctcaacggccatgggtcggattgcaggcacaggctcagatcctcggccagatagcccagttgagccttgtcgctgccggcaccggcggcatagacgcgcatcacggggccgatgtggtcgatggtcacgttctccaggtcgccgccgtatcggcggcagtagagccggtgcacggtggactggcccagatgcacgtcgccgtcggacgcggcctggaaagagaatcgcacggtgttgcccgcgagatacgggcggaactgcatgtcgatgccgttctcggtgttcgcgatggattcgagtatctggcggcacgactggttgcccgcgtcgaagcccttgaaatccatggaatggtttcccgattcgccgcggttgttccagtcgatgggcagtcggcctcccggtttcatgtcggtgcacatgtagccgacctgcgcggcgatgccccgccacgagccgtgcagagtgaactcgtcgctggtcgtgctgttcgccgccctgccatacgtgttctctcgtacaaggatgcgcgagtccagcagctccatcacgctgttgagcgtgaagctggtgtcctgccacgagtcggtgcgggggctgatcgagcccatgaggatgggcgtgccgaggtcctgcgggtcgaggctggttttccagaacaggacgatggaacgcttgtcctgcgcgagcatggccacccgttccgcaggagtgctgccgggcacgctcgtccacggcagcgtcaggccgctggcgtcgtattcgccggcgcctttgtccttggtggtggaaagcgtggaatcggacaccgatatgctccacgcgaacgaggggatgtcgatgggggcgatgagctggccggtgatggtgtccgcgatgtaggctcgccagctcactagtccgccaccccggaatcgctgacgcgcagctggtggatgccgtggatggtgaccggataggtcagcccatcggcgttgccggccacccagacggcgacctgatgggctccggcattgacctcggcgtcataggaaaccgtgtacggggcgctgtagcgggtcgccataatctcgtcgcaggggccgaccacggtcgggttcgtggtgggcgtgtcgttgatgaccttcgcgtccaggcgaatctgcatgaaatagctgcccatgggcttgttcgcgtcgtcgccgctgccggagggcaccgtggccgacgccttccattcgacggtgaccagacgtttcgtcggcaccgcgaagtcgatgcgcagcaactggtggtagaccatcttgcccgccgaatccttgtcctcgggaatcggatagtcggcggtcgaacgggcgatggcgagcctgccgagcgaagcgccggagggaaccgcgtaggtggccgaccggtacatggtgctgcccgacgtggaagtggcgtgagcgggcatgagacggatgcctatgcgggtagcgcctgccggcacgcccggcacggacggagtgggggaggcgttgccctgcgtgacgccgatgaccacatggttgtcggcatcaccctgggtggggtcgttggccctgatccagatgcagtcgatgcgcggctggcttccggtggcgctcacggcgggggtctggcctccggcccagtacgcttccgtgtatccgtccgcgtcgccgcgggagcatacggccatgccggccccgacgctgtaggtcaggtcgcctcgacccgaaacgttcaacccgctcacgatgccggtgttggcccagtgggcgcggattatctgcctgtgcgtcaatggcgtgacgcccgcgccgctcgaatccggtgcgatgcccaatgcggtggtagccatgatcagacctccaaaaaaatacgaataggggaaaggaaaacgaatgggggaaaagatggggaagtcacatccacgtgtcacggacgaggcagtccacgtagccggtgccggccgactgcaacgacaccgacaggctcccacccgactgcacggtcgggaagccgcgcgacatgagataacggctcacatcacggcctcccatcgtcgcggtgcccagccggcagtccaacaccagaggcgttccgccaacagaacccgtccaccgtatcgaggaaccgccggagaattgcaggatgacaccgctgtcgaaacccccgtagacggtgaacacggggtaggcgcgcgaactgccgttgttgagcagcgtgccgacattgcgggagtccgtcgcctgcctgccgtaggtcaacgggtatacaagccccgccctggcaccgccgtagaacaggcctccgcgaccgtctgatgtgggcttcaactggcagcggtgcggagtccagctgaggcgttcgggtcgcgggcatacgaaatgcagtgtcaggtcgttttccagcgtggggtgccatgcggagctgcggcccatctgtgccagatagccgtccacgtaggtgtcctcccctccgtcgctgaatcggagtcgggcgtttcggtgggcaagccggttgatcttgcgcatgatggagagcagttcgccgcgcgacagtccgatggcctcgtagtgcacggtgacggtgcgagccgaatagatgaggtcggattcgggcacgtcgtgcgcgccgtcaccttggcctcgttccgtcagctccaccttcgcgtccggcatcgtgtcccaaccctcgaccccgttcgaggtgacgtaaaggccacgggaacgggagtcgtcggggttgaaacggcatatcagcgtgccgcccgcatagagttccccgaagtgcgggtacatagtccacagatcgctcatattcggctcagccttccgacggttttcaccgcgtcgcggtgcagtatcgacccggccacatacaggtcgtccgccggacgaacgatcttctgctggaacaccggtgcgatggtctggttgacggtctggttgttcgtgaccggctggctcagcaccatcgggttcggcttgtagaacctctcacgcggaacctgcctgcggttcatcgccgcgtacaggtcggcgccgtagtagtcgacgcttttcacgttggacacgaattcgccgctcttgacgcgcgcgttcgccaacgtgatgttgtcgccgcccatagtggtggccttgcctggcaggaggccctcgacgacacggccgccagtggcgtagccgcgcatcgaaaccccgtagccgttgaacaggccgccggtcttaccggtggggatgttgcccatcgccccggcaggacgataaccactggacgaatacgtgccaccgttggaatcctcatatttaccgtgaatcgtgaaccacttgtccgcgatttgcatgttgttcaggccttggatcactccgatggcctgatcgtcgttggcgtagatgtagccggttttcgggtcgatggtccagccgttcgcttcggccaccttggccagcatgccgctgttgtccccctgcagcaacccggttttcgggtcgatggtggcacctgcggcgatggccatcgcatagtcgaactgggtcttgtccagatcgagtttgccggttttcgggtcgatggtggcaccggtggcttccgcgatcttctgcatcaggtcggtgttgtcgccgctgatgcgcacggtcttgtcatcgattttctcggccttcagcttcacgttatcgagcgccttgctggcatcatcggtgatcttgattttcacgtcgatgcccttggcggcggtattgctcagattctcgatgccttgacgcagtacatctgcctgactgcgggtcaggccgtaacggtcggcgagagcgcctgcggcttgttcgctcatgcccgcggcatgggcgttttcgatgaaggcctggcgggcctgttcgagtttgtctccggcttgttgggtcgctgctgcggcgcggtcgttggcttggccttcctcaatgatcttctgcgcggtgtcctgtgcagtggaggcgagggattgcagggcggattgcgagtcgtatgcctgtttttcgtgtccctggaggacgttgccgccttcgtcgaacacacgcccgttttccgtgatgctttcgttgaggtcgagtatcccctgattgagtttggtgatggcctggtcggtggtcaggtatgttcccggcaggctgagccagcctttcacaaggccgtcgatggcttcggtgaggtcttcagtgcttgtcgcggcgccgtccgcgctgtcggcatagttgtcagtgccctcggcggccgtgtccgcactgtccttcgccttggcgacctccgtgtttgttttgctgacctgctccttggctttgccgacctgtgaggatagtttgccgtaactgtcgttgatgctgtcgatctgcatggcggacatgtggcttttcgcctcgtccagctgtttgtcgaacagtgcctgcgcctttttggagccgtctaccgcttcggcgaaggtactgtagtcgatgccggccttgtcgagcgcctcgccgagcgagcctagtccggtggcgaacttgtcgccgaagtcccatgtcttgtcctcgccgctggcgattttcttgatgagggtttcgacggagctgccggactggtcgattgcgctggagaattcgctgatgttggctttcgcgtcctgtgcggattgggcgaaccccacaagcaatgcccccgcgaccgtcaaggcgatgccccatggtccgcccaaggcggcgaacagtccgctgccgatgcttttcatgccgttcatcgcggtctggcctcgtgtcagtccgttggcaagcgtgccggcgttggttgatgtgccaagcatggaggtgccaagttggatgatgccttccttgagcagtggtatggcggtgatgcctcgctggaacgggtcgagcatcaggccgaagttccgtgccgtctgcgagctgctggcgttcaatggccccatggcggagtgcagggcggtgaagcctcctgcgagcgcggtcatcagtactatgccctgttgtactggtgcgggcagttggctgaacgcatccaccaaggtgtcgagcggttgcacgagggagcgcaatggtccctgacctccctcgcccaaagagatcatgagggattcgaaagagccgctcagattctccagatcgcctttcaggttgtcgttcttcttggcggcgaggtccgcggcgtagccggattggctgaccttcttggtccattcgtcgatgccgctcgcgccctccgcgtagagcacgttcgctccttggatggcgtaactgccgaacatggtcgccatggcgctgttgcgctgttcctgggtgagcccgccgagcttctccttgagctgtccggcgagactgctcatgccgacgaagttgccttgcgcgtcgtacagggatatcccatattcctcggtggccttccgctgtttttcggtctggttggtcagtgcgagcagcacggagcgcagttgggtgccggcttcggctccgatgatgccttggtgcgcgaatgcggccaatgtgccgacggtggtgtcgatactcaggccgaacttgctggcagtggagcccacgttgttcaacgcctcgccgaaatcgcttacgttgccgagggcttcgccggctcctgcggcgagcaggtcggcgatatgcgtggcgtcggcgccggtcaaattgaattgggccatggccgagctcatgtattcggcggcttggccgacttccatgccgtcggacgctgcgaggttcaatgcgccgctcaaaccgccggagagaatatcggaggtcgataggccggctttgccgagttcgttgatggcgtcggcggattcggtggccgagtatatggtgtcggcgccggcgtcgatggcggcctgacggagctgattcatctcatctgcgctggctccggtgttggcctgcaccgtcgacatgctggcatcgaagtccgctgccatcctgacagcggcgacgcccagtgcggtggcggcgactccggccgccgctatgccggtggtgatgagcttcgatttgcctccggcggcttccatggtggtggccgccttctggctttcgccgctgaccttggccattccggcggtgaagttggacgtgtccgcgagcaggcggactgtgatgttgcggttcaatccgcctgccatagcggcctcctgagatttatcttggtttgattcccacagtcaatgcggactgtttcagctcgttctcgtccgcatggtctttcttccactcgtcgagcttgagggattgcatgagcgatatctggcatatgccgacgtcggcagtgaaatggaagggtgtctgctcgtcgtggcagaccgagaggggcatgccgcattgggggcataatgagtgttcgtattcgtcgagcgcgagcatccattcgcgttcggtcgcatcccattcggtttccggcgtgtagccggtgatgcgccgatgttcgtctcgttccacccgatacgatggttcccagccgagccagcgtttgtagctgatgccgagcttttggcagattctcagctcgcggactgtctgcggattatccgcgaggctgattcgagtgcgtcttttgggtcgatgagcttcgcattcaggtcacggatcgcgtaccagatggggctgatctggccgtcggacagttcggtcatgacgttcgccagatcatccacgggggtttccggcacggtcttcctgaccatgagtctgacggcgtcggcgcagatgtcctcgatgcgctgtttcgggatgccgttctctgtgacggtgttcgactcgagcatctggcgccactgggagagcggcagcgcctccaaggtgatgcggatggtgtcgtccttcacctcgtcgcgcagcttgtcgatctgttcggcgatgcgtttggcggcggcgttgccgccctcggtcacatgctgcgccatggcgcgttccaggtcggctcccaatgcggcgacctgttcggccttctcctgatccaatatgaggtcgacgtccacgcgcttgcgcttcacttccaaagccatgattatccctttctgcaagtttcggattgcctttctgatgggggcgagagaatgtccgtgcggggccagaaaggttaagagtccccgcgcggaagttttgtcagccgccggcgatggcctctttcaccgtgaccgtccggcctccctcacgggctgtggcggtcacggtcggaggcgtcagccttttgggttcgagatctctgcggtctcggactcccagccgggggccttcgcgaacagcggaatcttcgagcggatcatggtgctcgcgtccgggttgatgacctgcttctcaccgcagatgacgctcacgacggtgagcttctgccctacggcgaggggtgtgtcggtggccatgccgcgacggcgcacgatatagcctgaggcaccctcgtgcatgagggtgacggcctcgttctgttcctggtgctccgtgttcgtgttgtcgatgacctcgatgctgatgtctcctgcgctcttgcggccgggggccccgaagtcctgcacgacgttctcgcgctggtcggatacggcgtcctgcgacgggtcgaagctccagccgccgagcatgacgtagttcgagatgtcggtgcctgcttccagctcggccatggtgggggccttgatgtccttgatcgtcggcacccatagtgtggtgatgttgccatcggcgctagtgccgggaatctctgtacctagtttcagggtcataatgtgctccttgaagcaaaacgccaccccgtatgggatggcgttgaagacttttggtaaatgattggttgactatggtcggctccacgtgaagcggaaccggaggacgcgcacctggtagcggcgcgcggtgtcgtcggcggtcagaccggccgcatacgcgccggaatcctcgtacagggtgagctggccgaccgtgtagcccggcggccgggtgggggagcggttcgccaacgcggggatcagcatgtcgtcacaccagatgttcacgctgtcggcggtggtgctgacggcgcgaacctccaacagggcggagtgggcggcgaaccgcatcgtttccgccgccacatggcggtcggtggagacgcgcgcgatgatccacggcggcatctccgactccaacggctcctcctgccggtagaccttcacgccggacggcatggagggcagcaggtcgagacccgcattggtcaggtccatgacgctcataatccgatggctcctatcagcatgtcgtcggcggcatcggccacgtattcggcgagcgtgggcaattcttcttcggcgtaatgctcggggggcttgtgcgttccgccgcctcgcgcggtgccgtagaaggcgatcgcggcgacggtggggcccgtgtgcccgtgtttgcgggttttgccggaatcttcggggcctatgtccgcgtatatctgcgagccggtggttcccaactcgtatctcacacgaacaacgtgcaatccgccgttgctgctggaattcaggtcgctttgggttttctccttgacgacctgagcccccttcttcacggccttggcgatactgaccccggccatcgcgtgagcggcggcgattctgcgtccgaaggcggtcagctccgaagcgtcgattgtcacgtcactcattgctgttgcccacctccttcacgttccaccggcatgcggtcgcatgcgacttctccgactgcatgttcaacaaccggagcttcctgcccttgaggttcgggtcattggcttcggttatctcgcacacgtcgcccggcaacaatcccgtggtgccgtaggggaagtgcacgtacatgctccacacgggagtgacggcgccgagggcttcgacgatgccgccctccgtgttctcggcggccaagccgccggaggtctgcaccttgcacttgccctcatacacggttttcacggccggttccaccagtcccgtttcggggtcggtgaccggtttgcccatgtggaggacacgacactggtcgaacatgaggctattggcatatgagcgcagccgttcaaggctggcggttttgaatcgcggtacgctcactggctcagcctcgcgttcaggaagcctggattgtcattgtcatcgtcgaaccagccaggaagcatgtcgagactggcatgctcatcccttgtagtggagatgacacccaagccgccgatgagcggcgactggtcggcaatcagatcgtccaatgtctgcatttcgctggcggtcagatacaggcctgcctcgtcgaccttcctgctgccaccgtccatgccatcgtcaatctgccgcgaccatgaggtctcgccttccggattcgaatagaaccgcccggcgcaggcaagtgtcacatcctcgatgtcctccggcagcgaatccacgaggttgttggattcgtcgacccaactgcgtttcgtgtaccggcggattcgattggacgcggccctcaggcagcgttccgcgcgcttccagtcggccgatttttcgggaatgttttccccgagccattcggcgagatcggcgacctcggcgaaagccggcattctgaccttgtccgccataacgatcccttctaggcgatgattccagccgccttgagcgaaacgagtgcggcgttcagctgcttcttcgtttcattcagttcggtcaccacggcgtcgaactccgccttggtgggcgcttcacccgcagcggggttggcatcggcggaagcgactgcggccacggtcgcggccttcttcacgccgcccagcgcgtttgcgctggcggcgggaagtgaataggcggggggaatgacgccttcggccagcttgtccttggtgatgccgcctgcaagcattccgttcgtgaccgaaccggctgcaggggccgatccgacggtgagcgggtgacccgtcgcgtcgaatgcggcgacctcggccacgtcctgtccgtcgatgatggcgggctgggagatgaatcgtatctgcttggccatcacttgctcgccttcggggtgatgaagcccgccggatactgggtgccctttgccgcgactcgggtaatcgggttggcgacctggaagccgacgcgcatgaccacgcgcagagccttggcgtcctgctgcatgaggttgtagagaaccttgccgtccgcgttgctgatgacgccctggtcgaacagctggtaggtcatgtcctgtcggatgccgaccacgaacttgctccaatcggcggcgagcaataccgccttggtagcatcccatgcgccgttcttgacctcgttgagcgggtagccgtacaggttggagggggcaccctgcgtcaggctgggagtgtagaccggctggccgttcgcgtcgcgaaggccgacgagctgccagttgagtccgggctggctggcgaagccgttgaccgcgtagcctttcttgctcaggttctcgccgagcttggcgacatcctgcgcgaggtcgacgccggtaccctgcgcaatgttcgtgccggcggcggcgccggcgaggatgtcgaggccccaggtggcgggcttgtccacgccgaagatgccggcttcgtcgatcttcttgccgaacgcttccgcgatgagcggcttgatggtgtcccacaggttgatcttcgcgtcatcgaccacggaatcggggatgggcacgatgacggccatctcctcggcggtgatgttcacgtcctcccagccggtcttcgtggtctgcttgagtgcgccttcctgtacccagtaggcttcgggcagggatgcgagcacgggctgcgtcttcttcttggagctcatgcgcatgcgcttggctcgggtcaggagaacggaggattccggaacggtctggatgatctcctgggagacctcgtcggggatgaggctcgcgcccaggtcggtgcggccgatggtgttgttgaagttgtctgccatgataggttccttacttgtctgtgatcacgtcgcgcagccagtccttcgactccgtatgggacgggtcggagccgcctgacgggttggcgcggatcacggggttgatgttcttggcgtcgcccgcctcctgtgcggggatgcgtgccgcaagctttgcggcctttgctgcgatctcctcgggggtgcctcctccgatgaggtcaaaatcctgttcggtcaattgtgggtatttggcgcgggcctcggcccatgccttggcctgattgaccgtggcgagctgttcctgcgcctccttgaggtcacgctgcagcttctcctgttcggtgagtttcgcgtcctcgatctcgcgcagtttcgcgctgttggagtcgttggactccttgagcttcgtgttgtcggcgcgcaggttttcgatgagtttccacgccttctccgggctgaactcctcaccggcgcgctcccatggcggcttttggcccgaatcgcctgtaggctggttcggctcgtttccggcagcgccggtatctggctccttgacctggtcttcggtgtcgtctgccatgatggtttcctttccgcccggcttgcgggcataagaaaagccaccatgaacttcacggtggcttggatgttatgtgtggaaaggtgaaaggccgggaaccttccaccagaccaaaaggtttaaagggtggaaggcaccggccttctaactcttagtataccctttgagacgccgttcgatggccccgtccttgaacaggatgatctctctgatcctgttgttcggcctttggagtttgctcatgcaatcatccacaatctgttccatcggtttcgggcagtcggtgatgtcgagaatgatgcgcggactctggctcttcgctttgcgaagagcgttgagcacggtgttcttgccgcttccgtggagggttttcagttcccaggtgtctccgtcgatgaagaagtcaggcgtcttgacatgctgctcgtcgacgggcttgcggaatgtgacatcatgtccgaggtccgtcatctgtttggcgaccgttctttcggcggcggacggattcgcaccggtttcgacccaatatccgtcggaatgccgcacggcggttttgcctgtcgacaatgtccgtacgttgttgacggccgggctattggccgctttgcgttgggcgcgtctggccgcaaggaactccggagtgcttcttatggtcgaactgtcacggaaggttccgttgcggcgcaggagcggaagcacggtctcggcggtgcgcggagttttggagggcaggctttcggcggccttgtagtattcgtcgatccactgctgttccttttcggtgggcttccagtccccgtacacgatttcgacggtgcacccgcaatgcgggtggtatttgtgtccgtcggacgcgcgcaatccggctttttcggcactcgtgtagacgggtcccctggtggccagcatcgcgcagaacgcgcatggattcccgtcggagactcgccgccagcccacggctctcgtatccttcttggcccagttttctatcgtggtgcgtccgccggtgagcacggcctcgtggaatattccgaggaacaggcttcgcgccgccacgtaggctgcctcctgggtctctccgcgcgcgatgtgccagagcacgttcgtggcgccggtccagtcgatgcttcttgcagcctgtttgcgatcgaaacgcggcatggcggtctcgaagccgccgtcgccggtctcggcctcccggaatcggggcaggtactcgttcgcggtccgggcgctgatccgccaccaagtctgcagcagttggaggatggcgttcttccatatcggctgcgtgcgtttcagatcgttcgggtcaagcgtggagtcccagatgcggcgggcctggctgtcggcggtgatggcgagcctgacctgcgcacgccggtgcttgtcggtgagcatggcaccgtcattggttcgcgccatcatcgaccgccggttcgagctgcgcctgatacgcctgcgcggcgagcgtgtccgcgtccggatggttctccacccattcgcgccatgagtcggcgcgcgacttggatacgcccggaatcatgtcccacaattgctccttgggcgcgccgagcatctgagcggccttgcccaaggcatcgaccgcctggttgatggtgcgcacgtccgtatcctcccacaatggggtcaggtcgaaattgcgcgcatcgtccatgcggccttcgatgccagcggccaagcgaagcacgtccatgtggctgacgccgaagcttttctgccgttcatcgcgtttcgcgtagaaaccggcgcggctttcggctatgccggcatcgcccacgttgaccattttgccgaacgcggtggtcggggtctggctgaccgcggcgagttcctccacatcggcttgtttcgcctcgatgaggctggacagcgcggtttccgggagcgtgccgaactggacaccctcgccgccggcgagaatatcctcctggctgagcttggctttccggtcagcccgctgctcgtccgacaattcggtcatgtccagaccggtgacggtgcgtactttccacgaattgtagtgttgggccagaagccggtcgtaattatccttgttcaatcggttggcaagggggatgaacggttcgacctcgccgggtgcccttccctgcaggtcgaggtcgttcgtgtatcggatgaccggacagaccggttgcccgtaggaatcggtcgccagatgcggcgtgcagtccacgaactcgtagacaccttgctcgcgtctccactgccatacgttccatgcatcccatagctcgtatgagtccacggtgtcggacagtcgccggcgacgcatgaacacctgcggatatgtgtcgcgtgccggatcgtcatatagggcgatgctttcgcgcggcgaccagcagtcgattccggcccttacgccgccttccggggattccacggcgcgcacggtcgcatacgcgcaaccgtaggcgatggccgccttatgcaaggcgacctggcggcggcccatgcggctggccacccatggatgccagaacaggcgggccgaatccgtgtcctgcttgccgggaatatccacaccctccaagtagagggtctgggagattgtggtcaccacaagcctcagccatggcgtatgacccatatccctaagcatgcgatgctcgggggtggctctgcgcaggcggatcggtttcggattccaccgccaccagcggtcgatgcggttcaaacgggtgatctcctccccgtaggcgggcagcagcagctcccgcaatgctttcgcggccgatttctcatccgcgtaaccggtggtcaccatacctgtccaccgcctttcttccggttgttcaaatattcgcgtcgcatgccgcgcgcggcaatggcgcagaacgcgagatctatcttccgttgggactcgcgcccctccttggcgatactcatgcccgccttcgtgggctggcggcgcgcgttgagcatgtgggaacgcaatctcgcgtcaccgtcatgggggaaatccttgtcgcagatcgccgtgtacgcctggtccacataggtgacgaaccttttctgcacgtcgaggcgaaccatgtcgaacatgatgctgtgcctgtcacggccctcgggccgcgcccagagcttcaatcgtcgcccgtattcgcgatgccaggcatcgaacaggggatcccaatagtgcaggccggtctcgtcgtccagcacgtggctggggtctccccaaaaggcgaccacccggtagatgcgcatggcttctcgcacggtgtcatccacgctttcgcgtggcaccttccatgtttcgccgcgtttgccgggcggccttttccataggccgagcggcttcgtgaaaccgtcgctgaccctgcaggccaccaaggcggtggcatcgtcggtcagtgagcagtcgaggaacatcgtgatctcctcgccggcctccagcttgagctcgggatgctcgttggcatcccattcctggctggtgacgtaggcgtcttccggggcctcgcactggttgtaccatttgcgtcggctttcggagaccggattcttcgggtcgatgatggtcttgacgatcttcgatgtggtcagccacgtggaatctccgcgcacgtcctcgatgaccttcggaatcatgtccaccgtcatgggggtgtccggcgcggcttcgatgctgtcatagagcagaccgtaatccatgtatttcggccgcagaccctgatcgttgctgttcgggtcgccctgcgtgccctcccatgcctcgcgcaccctttgggcgacgctgtcctcgccgtctcggtaagcgttgcagatgtcgagcatcttcacgttcaccgattcctcggacttcgccgcgttgccggacagcacgccgtccatgtcgtggccgccgttgctggaattccagttctgcgtctcgttgcggatcaggaacgtgggacgtccgccctccaatgcgagcgggcttgaggtgacggcctctatctggcggctgtccccgagcgcgtacatgttgagtttgccgagctgtatgccgtacctgcgccgggtttcggcggggatgaggccgggcagcagtttcatcgtgttcttcgtctgttcctgcgagactgcgcacacctgcacccaggcgttcggttcctcgcggccgaccggatcgccgttatggtcgaaccggtcgaaggtcaggtcggcgaagcagctggcgacggcaccgccggccgccatcgggtctttgccccaacccttgagccgctgcagcaccgcgttatcgtggacgggcacgccatgttcgtccagactgtagaaccacagccagaaacgcgcctgttcgagcgtccacttccatggggcgcgctgtttggcgttgcgcagccagcggccgctccaagccaggaagttccaacccaaagtgagatcgggcaaaacccagccgtcgccgtcgtgcttccatgtgggcccgatggtgaccgggttggtgttccagtcgcgtgcgggttcgttggccagcgcgttgcggtaccagtcgatgatttcccggtattcggcttgatgggaggggatgtaggctgcggatcgattggtcagcagcctcgccatcatccaccgtatgcctttccccaccgtgattgggccgcgtcgcgcatcctggcagacctgtcgccctcatcggtggcggcgttttccttctcgtcgggttccggcatgacgatgcgggagagcgttttggcgaggtgctcctcgtcgagcctgagttgcgcgagcagcgggtgcgcgacgatctgtccctggctgccggagacggtcaggtcgtcgccgatggcgcggcgttccttgacgatgcggtcggcggtgtagcaggcgttctccagcatccggtattcggattccgtgaactcccatttgccggtcaggtcgcgccacagggtctgccccttgccgtccttcatgagtccggagggcatgcggtgcccggacgtttttcttggtcttggcaacgtgcgcctcctttctgcgggtcaggcgagatgtgcgatcacgtcgaacaggaatgtgagatcggcgagtttcgcgggacttttgcggaacctgtgccccgtgtaggtcatgtaacggccttggctgtaggcctcgatgttcatgccgaggtcgttgcggaccttcagtccggttcgctcgccgcagcgcccccagatgtgcagtccgtttccggacgggctgatttcgatccatgtggaatcggccacgggggctatcagcatcttcgcccacggggtcagatggttgcgctcgtcatagcagtgatcgaggtcgatgcatgcgaatccgtcgccgagcgcgaatccgagaccttcgccgacatcggaggattccgcctggggaagcgcggcccatgtggacatgtcggtgctggatgcgggggagccgtcgacggtgaccggcagtttcgatgtgccgtcgccgcgggtgattctgcgccagtgcatccagcggtcggccatcgccatcgcgggaggtacgggcatttgccctccggccctgtgcgcggcttggcggcaccggtcgtcgcagaaccggcgcttgcgtccccgtctctgggcttcggggagttccttgtcgcaaaattcacatcgtgtcacgctttaattatatcgtgacaacgctaataaaacaacaaaacagcgcaatatcaacgattcttcaatatcgtgacatcacataaaaaaacgagcgccgaccagcctgtccgagccgcgcgaaaacgccacttggctccatacggcgaataaagccgccaagaacggtacagcagggaaggttccgataaaaatgagatatcgcgaaaaacgggcgttctgggcgcatgcatgaccggaggtgctatccggcggttttaccggcaagccgggggagtcccctcccaccccgcttgggtcagtcgagcaggccggggaaacgttcctccggatgttttcgcattcgcttgcgcttggcgttcctctctgcgttctcacgctccgttttcgctttatgacaaggatgcgacagccattgcaagttgtcaaggctgtggtcgtcgccggcgatgatgtggtcgcagtcagtgccgattccatcgcattcgggaacatgctgtttcgcttggcacagaccatgagcccgtccgcgcaccttggccctgcgctcgggccagtcatccggcagtcgtgaacctctgttgctggagttccagttagttcgctgtctgccgtgtcccatgcccctcatgccccgtggccccataggtcatcacgatatctccttcgactgtcagatgaaccacattgctatctcgttgttgacattatgcgattcttgattttcgtagttctccgtatgcgccggatgtggttttgagaactcgataaatgcagaatgctaagtgtgtcattagccatacaatcgccgccgatatcagttttttccctatctgcggcagtgtgtcgtatacgccaagggaagatcccatggccacggcaagtgtaatccccagagccaatgcggatgagtagacgacactatagaacatatcgttgatgagtctggtcagttttgtgttttctgcctgtatctctttgtttctgattctttcccgtaggtttgcgttgtacgtcattcgcaattcgaaaacgaagatcgcatgcgcaaacagaaggcctccaaggacccccaaagccgagacgatgatgtctgcgttcaatgcaagtcgggagaagcgaaagtcaagatatgcagcaaccgatggaatgagtatttctcggaatacgtatttccatgcgatgcttcttgtgttgtgtatcttggggcacaggctgaggatgtactgccataatatgccattgttatggtctttagtcctcggcatgattgttttcctccggcttgggctcaacaagattggcccagtcgatttctcctttcggtatcagctcttctccaagctgtcccttatcccatccggattggagtttaatttggctttctgcatatttatcgaggattgaatcggcgagatggcgtcgtagcgcaccattatcgagtcttggctgtccgtagtcggtaatcagttcacgtactttcgggcttttctcattgcctatggtgaaggtcttacgacggttgtctgcgccgattgcggttacggatacgttggttttctcgacggtgtcattatcgagggccgggatagtcagcatgcctgccttctccaatgtgtgcttcaacatctttttccagaatctcgggtcgaagctggcgctacctttcggcgggttgataatcaaggacatgcggccgaaggttcgctcaacatcttcgtcggctatgccgttatccaatgtgatttgctgatccgtcgaaccgatgggtattgccattgacacaaggctgcttgagtcgaaccatgcctctttttccaaaatggaatgaatcggagagtttgaatcactgaatatttttcttatgcacttggcaaaatcttgaataaagtaatatccattaatcgagtccacatgttcaatagcgaatatcgcattagtcgcaccatccgctatgggacaagcaaatacaacacggacggtctttactgctgcttggtcggatgggatgtccgtgaccgacccgtccaacatgttcatcagctggctttcctcgccgtactgtccggacatcagctcaatcagtatgaggcgaccgtgaatttcaacgttacggaccgcatagaggcgctgcttgcgttcttctttgataattcttccacgctgataatcgatgtatccatataggtaggggagtatgctgcgtccgttcccaaggttcacggcactgcgaggaatattggggctcttttttcttggcttaacgttgaaagtgtagtagtcgacagtgctcctgaccatatcgttgctccccagctagaacgacaccaatgtagtttacggttatgtcatcgattctacatcgatatcgggggtttggtgctccggccgctggggattggccggaacacctagaggtcagatacgcgaaaacccagccacatgagctgggtttttcgacacttctgccactgcaattgtgtgtgacaaacaatcatttgtcaagctggccggcgatgacctgccggtacacatcgctgtagggaataccctgcggagtgcgtgcgacttggcctcgctccgcccacttgcgtaccagcgacgccttgagagttattccggcgtcggtgaacgccttggcgatgtccgccgctctgccttgcttggaatcatcccagcagagtttcttcaaacgtctcagtttcacggtctgcactcgctgttcggtgccgcagacggggcatgtgacccattggtctgcctgtcctgcggttagcatggtctcgcatagttcgcaggtgccgatctcgcggcgttgttcgggcgggtccaatgcgaggtcgaccttgcgggcaaggttgttgacgatgcgcatgtagaggcctgcgtcggggaatgtggcgagtttgggatgtccggcgcatgcgatgagcgtggcctcgaggtcctccatgcgtggatccctgtgccagtccaaggcgtcgatgccgtcgaggcagcgccatagttcgcgcgctgtcgcgtcgagcatgtcgatcaggtcgagcacgtccaagcgtatcggcgtcgggggagtggcggtctggatcctgaccggcgaatgcccgcccggatgcaatgtggcgtcgaggctgtcatgcaatggcgtgacgtcacgcgccaatcgcaataatgtgccggcgaggcgcatctcgcacgtctcgcacagcgaatacccctcttcggtcatcgtcttgcagttctgacagttcacgaatcccctccacgtcggctacactggttgtttgcagacatgccctccgccgttggtggagggtttcgttatttcagaacagcggcctgtcctcatagccgccggcgagcgccggtttgtctgtcttggtttgttgttctttgttttggttgaggatgtcttggacttcctgaagggtgatgcctagtagttgggctgtttcttcgggtgtggcggcatgtttggcgtgccagtcgcggaccatttgcttgcggcgttcgctggtcattgttccgccttgccggtgttgccccagtcgcaggtgacgcctccgttgccgagggccacgcagagcacgtggctgtcgcccgagaggggcactcggtaggagcagatgctgtttccgctgtttgtttcgccgcatgcgattttcgtggtttcctcggagacctgcgtggggcctccgcagccggcgagcatgctaatgcaaaaaagggcgcaaattaatgtgataagccgtttgactaatgtaattctcatgctttcgtctcctcttcgtcgccgtagaagcctttgggtgtgatggtcacgctgatctggcatccggtggcaagcgccgtgttgatgatgtcggtgagggttgtgttctcgttcattgttgttccttcgttttcatggcgttgacggctgcgagcgcctttttggcggcgtgcagccatgcctgtttggagacttcgctgacggcgtcccagttggtggggccgggtgtgcccgtgaagaaccctcgggcgcaggtctcgatctcctcgtctgtgggctcgtccgagttgagttcgttttcgatgcggatggccaggttgagcgccttgtcccagccggcctggtagccgacgacgaacgcttcggcggctgattcgttgcccagtccggcatcggcgagcgccgtgagggcttgttgggtgaggtcactcatcgtcgtcctccacgatggtcggctcgccgctggtctcgtacatggtcttggccaccgccttgaggttccggctggccgtatcggagcattggccgaagtgcaggatgctcacgccttccagcacgcaggcgctcgcgagcgcctgttcgagttggtcttgtgtgaagattcgtgccgtgtagctcatatggtgctactttcgtcggcgagcgccggccctgtcatgagggtgaggtagtggcggtattccgtgatgtccctgtcaaggcagtcgtggacccggtgcgtgggcttcatgcggtgctggtatgggtcttggccgcaggctttggctgcgaggcgcagtgcggtgacgtccagcatgcggtagtgcagcagttctccgaatcccgtcatgcagaagcgttcgaccatgggcaggtcgaaacggccgatgttcgttcccgccgcgtgcaggacgtacgtggtggccatgccttggatgaaccggagggcctgttcggcgatgaccctgggtgagttggccagcgggtcgcaggattcgcattgggcgagcagaccgttgttcagatgcagttccagggcggagggctgcacggtcagcagggtctcccggccgatgtgcaccacggcctcgaaccgcccgtattcgtgcatggcgtccatgctcgtgcagcgcaacccgatctccagtatcgaacacatgttcgcatcgaggccggtggtctccacgtccacccatagcagggcttcgggtttctcggggatcatagcgtcttctcctttccggcgagcgcctgaacgatggctccctggatggttcgggtttcctcgcgggtgaagccctgcgggatgatgattgtcctggtgctcaccggtatgtcgggcgggatgagcatggtcacgctggtgccgtcctctcgggtgaagtccacgttgtcgagttcgccgggcacggtgaccgcgtaggcgctgatcataagtgttcctttctgctgattttatcggttggtttgcgggtggttgggcattccctctggtggcgggcatgaatgccattggccgtcggtgtcgagcagtatccagccgcgccggcagctgtacacgggcacttggcttggctcggggtcgtagcttttgagcaggtagcccaatgctcgggcctgttcggggtgttggtggatccatccgtggcatccggtgctgttgtccacgccgcacacggtgacgatgttcgacgccgcgtgccgttcggcatcgccgtacgtctgcgagcggcgcttgcgatgatgatggctcactccgggccattcgccgagccgcaggtaccggtcgcacacgatgcaccgatggcgctcgcggccttccacgagcctgagggtctggctgctgggcttgtcgctcatgatgcttggcttctttcgttgatttcgtttacgagccgttgggcgacggtctccgggtcctcgccggttttgacgtgggcccagaacgtctgttcgacgctgtccgtccatgcccctgccggcacgaggctgatggcgtgctggctgagccattggcgtgtgatgccgccccattcggtgcggatgggttcgcttgccagccatttgacgtattgccggttttcgagccatttgcgcatcgatggcgtgaaccggttgccgtcctggcgcacggcttgggcgtagcggatgacggccccgagcagttggctggcctcgacgtgcggcacggtcgggtcgtcgccggtgatggcctgccacaggcgtgaggcctgctcgcggtttccggtatggctcggatactgctcccaggcgaaggcgaacgggtcggcttggacgcgggcttcggcctcggcgaggcttgacgccggcgtggctcggccggattcggtgccggcatggccgggaacggccggacttggttcggcgttcggcgcggagggggctacaggggaggtaaggctaggtatggttaggttaggaccggttgcttcgtttgcttcgaagcaattgcttcgttttgcttcggacgtttgcttcggttttgcttcatggtttgcttcaccgtttgcttcatggtttgcttcggttttgcttcgtggtttgcttgaagcacttgcttcgttttgcttcgaagcatttgcttcgcgtttgcttcgtcgagcctcgcccgaagcgacgccgccggcatgcccgaccttggcccttttctccttgagttcgctgccggaggtgccgccgaatttcatcagggtgtcggcctcgaccaccatccaccggccggcggcgagcgccggttcgagcattcccgcggcctccagttccgtcacctgtcgtgcgttgcctttcagcgagcgcaccacggtgaggtcgaatgcgccgtcgaatgcggggaatcgcagctggtacgcggtgtgcacgcagagtctgacccataggcccagcgcggcgtttgataccgtgccgggcatggtctgcgggctgaagttgagcccgtcgtctatctgggtccatgtcatggctcactccgcctcgtcgtcttcgggcaggaaacacccgttgagtgccttgttttcctcgtcgctggtggggtatccgaggtctgcgagcgtgtggtagtaggcttgggcgatggtgatgtcgcactcgtcggcccatgtgccggggttgatgagtgcttcgatctgggcgcacaggatgagcaggagttccctgttcgcggctccctcgacgtgctggcggcggtgcagttccgcgaggttcgtttcgcgccacagtcccctatcgctcgtgtcgtcgcatggcagcggcgtggcggcgagcaggttgtatgcgtcgagcacgtggtcgaggttgttccatccggcccctgcgatcaggccgtcgcataggttggtcccggtcagcgcgagcaggctcagacgggtgttggccttgcgcagttggccgccgttgaatccggcggcatgcgttttgacccactcggcgcgcaggccgcgtgccagggcgtcgaagtcctggcgtttgaccaagagcgcccggtcttccgcgttccttcgctcccgctgctcgctgtcggcgtcgcgtttggcgatctcctcgggagacatctgcgagaagcacaatacgttgcgctcggagaatcggatcaccggctcgccgtacgggttcttctcgcgccaccgcccataccattgcttgaactcgtcgggctcgccgctccacgtgttgtaataccggtagcccgccggagtcgtccatatagacggcccgggatccacgaccaggcccaagccgtcaagcacttgacgcatacgcttctgccagtcctcgacgcgcatacggcttcgcagctggccgcgcttccaatcccagttcttggtgcccgccatcgaggccaactcagccatcatgtcgggataagcctcgaactccgcaagatcatccagctgggaaagcgacagctgggcgaacgaattcgacttggcacgcacatcggcggggatacgcgcaatcctcaaacggccacgcacaaacgactcgctacgccccgtcttcgaagccagctcacccacgttcgcaccaaggtcaagcaaaccctgatacccgtcagcctcctccaacggcgtcaaatcggaacgctggcaattctccaccagcatcaactcacgctcggttttcacgtccaactcacgcacaacacacggcacggactccaaaccagccaacttgcacgccgccaaacgacgatgaccaatcaccacacgaaacatgcgctcgccgtgctcctcatggtcgggagttaccacaagcgcctgctgcaggccctgctccctgatgctgtcggcgagttcggtgacatcgcccacgtctttgcgggggttgtccgggttcgggatgaggctctttacgttgatatcgatgatgctgatagccactgaatcgggtcactactccttgatcgatagattctggtgtacgggcaggtgcggcatgcgcttcctgcgccggcgctgacgctcatgctccaattgctggcgtccgtgcttgcgttttgccacggttcagccctccttaatctcgccggtatccggatccacatccccacccgaagtgggcaaatcacgccacggatccaacagactgcgctcgatatccgccttcaccacgcgctcgcgggcctcgaccggatagttgatgaggtcgttgaccgcgttggcggcgtcgaagatgtgctgcgagagatcgcaggcgtcgtacagggcgtcggtgatggggtcgatttccttgtatttttcgatgtattcgtccttggtggccaggtcgagcatcttgctggccgcgatgcggaacgcggccgcggcgtccttcatgcgtgatgccttggctgtcagggcgagcagcatgagcggtgttatttcgtcgggtatcagcgcgtcctgcacgccatcggtctttttctttcgtgacattgaatctccttagaattcggggtcggaatcgtttgatgggaaatcgttggaagcgccgaacgcggcgccgggagaggcgggtgccggctgagcccacggatcgccttccggcatgccggggttctgggccggggagccgttctgccagccttgttgctggttggcgggcttggccggatccccatacgtgctgccgcccgaatagccgcgcccggattgcacgcgcgtcacctgcgcggtcgcgtacctcaatgaggggccgatctcatcgatggtcatgtcgatgacggtgcggttggtgccgtcctgcgcctggtaggaacgctgccgcaacctgcccgtggcgatcacgcgcatgccctgggacagggactgcgcgcaatgattggccagatcacgccacgcgctgcagcgcaggaacaacgcctgcccgtcctcgtactggttggcctgccggttccagattctcggtgtggacgcgatggtgaacccgcagacgacggcgccgctggcgatggtgcgcagctcggggtcggcggtcaggttgccgacgatcgtgatgactgtctcgcccgccatgttcatacctccttcgaatcgttcgacggcttgcgtttccacaggcacaccgccgatatcgtgcgccggccacggtcgaccaccacgtcgccgaaccggggcggcaatatggtcagcggccatgcgtccgcgcgattcagatgctggatgacctcgagcaggctgtccaatagttcgccggcgcccatgcgcatgcccgcggcgtcgagcggccattcgaacaggctttcgccttcctcccgatagtcgtaatcatccggctggctcgtcatcgatgctccttcgctcacgcggcgaccgtctgctgctggagaccgttgcgctctccccatgcgatcacctccctgaccgggtagacgacgcggcgcgtatcgcgttggcggtgctcgcgtttgcagccgagtttcacgaacctcggcccctcgccccggtatctccacacgccgagcgtgcccacggtgggagagcccccgaaataggcgctcaccttgtcggccttccaataggcgacgccgtcccggacgatgtcgggcggaatcatggcgctcatggtgtatcctttctcatgtagctgttttgcttcgcccacgttgccgcgtgggctttttctttcccgcagggggagtggaccgtgccgaatcgaacggcttcccgccgtttgccgcgcgtacatgacaccgcgcgatctccgacgggggcgaacctgccggccccgcacgccgcaccagctggggaagggtgcggcacgatggtgttagcgactgtccttgtcgattgccggggaaggaagaaccccggcaggcctttattcatcggctcccgcctcgcttgccacaagacagagcagacgcagggggactcccaggaacgcgaccagcgagcagacgccgttggccaacgggtaccggcacgcctcgtgggtcatcacccacgccagacatgcggcgaacacgacgccccagaagaccagccggcgcatgaaccgtttcgacgggcctccatccgccgtgcggaaaccgctggcgtgacgcccgtaatccttggcgttcatcgtttttctcttttcgtgtggcccctccgccgataggcttggaactgcgacattcaaaacacagccagcggagggaagaatgattgactgggtcaacgtggccggagccgcgttcggcgggattgccttgggagtggaggcgaaacggttcctcgacgagagtcgtcattggcggcacggaaggtgcgaccttgtctcggcgaaacatgaaaccttggtggaaaccatcgagagcagcgggaagaagaccgtacgcgagaccagatatcgcaggctccgtctcatgaacgtcggcatagcgccgatacgtctcatcggcatcctgtaccgaggcgtcacccctctcaagggcagtcccgaactgttcggcggccgcgagctgctctccccgggcgacgaatattccttaggcgcgattgacatcgaggacgatgcatggatgctcgtcacgtatagggacggttccgacaggcgtttcgtgttcctgcagttcattgatctttcctccgatccggacgacccgctggacgacctcgggcttatagggctgtggtggcgcacaagaccaaggacagtgcacccaaaaacctcggatgacgttcggttggatcgcgctcatccggcactgcggcgaatacgagcaggaagaccgcaatcgcaacgagaattacgatgcgtgtttgacgcggccatacatctaggagccgtagaagggataacgctaagcccatggcagctgaaacgatatcaatgatctcgtttaccggatcgaagtcgaaagcccccatccgatccagttccatcaaggccgcccgttcgacatcctccgccggacaaaactcgacatccatcactccatccgttccgatggtcgaagtgaagcgcgcttacgtcgagcgcgctcgatctcacgaaggtcaagctcgttcttgatggacaacccgatattcagaaggaaaagcgcgattataagaaccgtcggaccgttcatcacgccacctccttgccggcgagcgccggaatggttgcggtgcggatgggacgatgggacgcatgatgcggtagattcatcatgaatgctcctatgagaaagaagtcggtgatggtcacatggttgtggaatctgatacagggggatttcgcgcagaacccgacagcctggatggacttggcgatcacggttctgggaatcgtgctctccccggtggcgtggttcacgtccaaatatctggagggcaaagccgcgaaacgtgaggccaaggatgcgcaggagaagttcgacgcccatctggcggtgctcaaaagccagagggacacagcggataacatggccaaggcacttcgcgcacaggtcgaacaactcaagaatcttgtggaagtgctctccaatgccgacatagacgcggatccctggggcgatgccgaatggatgtccggcgacgggttcaggatcaagaacaccggcaagcggacagtcgaggtgctgtcggtgcatacggatgcgcggggattgccgttcgacagcagacggcatacgccattccgttgcccgcagggcgacagcgtcgagtatctggctcctggcatggaaaatggcagggcggtgggggtaatcgaatggcgattcgagggggacgacaggccgcatgtgacccgtcgcgtgagtttcattcccgggaagcagctcatttcagactcctgatgaattccattgccttggtgttatcgattacacggacctttgaataggtgacaacgcacttgtcgttaccgaactggaacgttgccggtttagcggagattccgccgcgttccgatgaaggctcctcatcgagaagcgcgtcgaaatccttcgcatgttccaatgacgggtggtaaacgaagtcatccatcacgccacctccttatcagcgagcgcggtagcgatggcttttgctgggtcgccgccggtctcgttgagtacggcgaggaacatgctcaggctcatgtcgttgcgtggcgcgccggtgcggaacgattggatggtccattcggttgaccgagtcagcgcgggccacttgggtgtctggcacgttgccgcggcgtagccgggcgcgcgcctgtctggtgagtttgctggcgaccttatccatgccgggtttgaccggcagtgccggctcgcgtccgatgcctgccgccgatgccttgcgtttgattggctcgctcatgtgcctgagtctcctttctgccttgggtcttctgtcagaggttcttgagctggtcgaattcttcgggggtgagggtgatggtcgtgtcggtgattcccatgtccccgattcggacctcgacccggccatcggccagtcgcctgaccttcagcggtctgcccggctcctcgtggttctcgattcggatttcctcactcattctgacctcctctatagcgcctgctctaactgatattcaatatagcgcctgctatattttgtagcaagtgctcggcgtgtctgctatagttgcatatatggcaacgaacaagagagagcggaatctcgtagatgaggtggccgcaaaggcgatgaatcgggtaatcgagcgcgctggcatgaataactccgccgtcgacagggcctcaaaaagttctatcggctataaccgcgtgcgcgatattcgcaatggccttaaagctcctgtcaggctctctgagttcctgcttatctgtgacgtatgcggcgctgaccccgtgcagacggtgagagacatactcgccgaggccagccgcatcgaggcggaacgcgccgccgacgagatggccgaccgcattgccgccaacccagaacagttcgacgtggccgcgaacgacgacccaaacaaggaaaacgaagccaccacaccccgcgaatagaggctttatgggatatgaggatctactcgccgaagcgttgagactcggcgtcaaagtccgggaacgagaactatcgcccggacgctgcggctgctactacgaacccacgcgactcatcatcatcgacgatgacgctcccagacttcgcccggcgttgcacgctcgcccacgagcttgctcacgctaggcaccacgatcgaggctgcgacccgaacgggtcaaaagccgagagacgagccagacgcgaaaccgtgctccgactcatcaacccgaccgaatacgcaatcgccgaacaaatgtacgagggagacagtttcctcatcgcacaggcgctcgacgtgaccgtacaggtcgtggaagattacaaagaactgctgcataacggagctgttgcgcagggaaaggataagacatgcacggaaagaaagtaaccgcagttgtagcattgctattaatgttcggattcctcactgcctgtggcgtgagtaaggaatcgacagccgccgacaaagctgaaacccagtcggaagccgaagatgccattaaagggaccaattctgaagacggtcaggaaccattgattgataatggcctgcacggcgaatgttccggctctgatccaagactccaatcggtgaaggtcaacaccaactcatacaaaattcaagttgaaataccgaacaacaatctgatacaaacgagcgacttctacggttatttcatcatgttcacaaatgatgctggagaatcatggcaggcaggcttcaaaaacatagtcaactcccatgaaacctctgtgggcgtgttcgacatggaaacaagcaagcagaataatctcggaacctggaatgatttggtgacgcttcaggacggcaccttctacgcgttgcttcccaaccaggatattcgcggcaccggcatcaagtggaacgcgacgctatccatcgatggccgggatgtggcgacatgtcccgctgatggaagcgatacaactttggaataaaagaatagaggccgggacataccgtgctaattcgcaggtgccttctcagtgctattgggaaatcacagtcaacaatggagccgacatagtgcagaacgacattccaggcggtggctacccacaagtgactgtctcggatggccaacagctcaaacttcaggactgcggaacgtggtctaggcaatagcgagaaagaagaagacaatgaccgagtcaacccccatgcaggcacagcagccaccaacaccgcagggcacgcagcccgcaaccataccgcccacaccccagtcgacgccgaagaagaagctcccgataccggccctcatcgccatcgccgcgatcataggactggtcgtcggccttgccggcggactcggaggcatgtacctgtacgccacgcccatcatcaaccagcagaagtcggacatccaagacctcaatacatcattggactccgtcaaagcgcagctagccgacgcgaacgaaagactcaacccccaggaagatcccaacgacacgggatccaacaccgacgcttcgagcacgggggagaccgccgtcagcggcggcgtcgaaatgaagatcctcgaagccggcgaacagcccaccatcagcttcgacacatgcggcgacggatgcagcaacggccaatacgggccaaagacaccggacgcgaacaccaagtactgggtggccaaggtggaggtcacgaacaacaccagcagtccgatggacatcacctgcagctacccctatgagatagtcgcgttgaactcgaagaaccagaaatacacgcccatcaagaatctgtatcaggtcgaaggcaaccccgagtgcaacgcccagctccagccgggattgaccagcacggtcacctatccgttccaggttccattggacgcgaagatggttgccatagcattccgcgacgtcggagacgtgtattccggcaccggcggggaggacaactactcctatatagtcaccgacccgaattacgtggtcaatcgatagaaaaagaattgccctgtcgatctggaacatcggcagggcgtgtgaaacatcgaccagcttgcttatcagaaaggaggacgcttcgcctcccatcctacacggggcgaagccatacctgaaatgtcagttcttatcgtcctcgtcaatcatgatgggggagtagaagtagagtctgtccgtggcgagcggttcgaattccttcgaccagatgtcgaattcggggtcgttctcatcccgcccctcgttctcgaagcccgcgccggagaaaaggtgaacgctggcctcgttccgggggtcgatctgtgtaagcacgtacggggtgcgcccgtgtctggcggcgtcgttcgccatccatcgcagcgcgcagtccaacagtattgcaccgagatgccggccgcgttcgctcaacgcggtggcgatgaacgatatcgcgtaaccactggattccggggcggcggggtcgtatccgaactcgcagaagccgacgatgggagcgttcggggtttccccgtactggagaaccatccggtacatccccggctcgtccttgacgcggagtccgcggatatagcgctgcacgtccatcgcgtactccgggccgttcggctcgcagcagacgaagcggcgcaatgcgagctggtcgccggagtcgcacaggcgactagtgacgatcgctattctcaatcttctgcgccttcttcgcgagtcgtgccggacggttcatcatcgcgcggtgcagtcgcatccatttctcgtccacggcgttgcgtggcttgccgtcctcgggcggcgcgtacgccggtattggcttcacgccggtatccgtcatggtcatggccgcctcctttcgattttggcgtagggggatagcctacgtgtttcccttccctttgtcaaatcccattaaaacacatcaaaaccggttaaaacacgttaaaaccggaaaaaccgtacaagtgagtgaaaatcatggcgaacatcaccagatacaggacggccaaaggcgaaaacaggtatcgagtccgctaccggaaaccggatggcacgcagaccgacaagaggggcttccgccgtaaaatcgacgccgaaaactgggcggcagaacacgtcaccatcgccaaggcaaccaacagctacgtggatccggaaggcggcaaacggctcgtcggagacctctacgagcaatggctgaaggagaaatggccgttttggaaggaaaccacacgggtcaacgccacggaagcatggcggctctactgcgaggagcgttgggccgatcgtcggatcggcgccatcacccgcgccgaggtccaggcgtggatcagcgacatcatcgcgagcgccggcgctccatccgtgagacgcccgtaccagaccatgctcggcatctgccgcatggccgtccgggacaggctcatactcgacaacccctgtgaaaacgttgaactccccaagctgccgaggtgcaagagccgtcgcgtgtacctgaccatatcccggctgctcgcattcgccgacgaatgctccaggggaaagcatctggggaaggagcggcgggcgctcgtgctgacactggacttctgcgggttgcgctggggcgaggcggcggcgttgaaggcccgtgacctggacttcggtcggggagtgctgcatgtgggcggcaacctcgtgtacgtcggggcaagatgggtcgagggcactccgaagaacagcgaggaacgcgacgtgcccatgcctctcatcgtcatggaggcgctgaaaccgatatgcggggaacgcgaaccggacgaaagggtgttccgtgatctgcggggcggcccgatcatgaagcagagcacggcgaagacgaccggctggtggtatcacgcgctggtgcgcctgggctggccgaaggaggaatggcccacgccgcatgacctgcgtcacaccgccgcctcgttggccgtgcacgcgggcgcgaacgtcaaggccctgcagaggatgctgggccacaagaatgcctcgatgacgttggacgtgtacgcggacctgttcgacagcgatttgatggatgttgcccgtctgctcgatgccgccgtgcaggtggagacaagcatggaaaaatgtgggcaaaatgtgggcaaaaacattttggagcccgtatgaaaccctcagaaacgttggaatcatgccattcctgtgaatggtggttcttcagcaagttgaaggacgcactgagctgattcgttcttggcgcccctctccgaggggggactggcagtgaagctgactgagggggagctcgggtacatccgcaagctccccctcagttgtctagcgacgacagttcccttcagagatggacgccaagtgccgctaactatttcagcagtgagcggcacatggagcgatattcgctaacgtagccgccgccgaagaacacacaatggccggcaatggggtagagctgccagagcgtgatgcgatcctgccatccagccttcagcggatgcaccgactgatagccctcggtaatctgcgtcaaataactcataccgaacaagtgcagcatggccaaatcctcttcacggtgaccaccatgtgccgccgggtcgatgagcacggcctcggtctgtccggaatcagcagtccacatcacattgccactccacaaatcaccgtggatgcgggctggcttgtcttcggcggcacggcccatgatgtcaggcaatgcctcgattaccttttccgtcagatcgacatcacgctggtcaagttcaccgcgcttgacgccaagctcgaccatcgggcgcagacggccatcagcaaagtagctgatgggatcggtccactcgccggtatccatctttaccggatcctgcaacggcccgaagtagcatgtgccgtcatatccttccggcgcagaaccgaaatattcggcaccggcatcatgcatgcgtgcgagcgccgcgccgaattccaatgcggccttggccgtgggggaggagctgttcactcgctcgatgtcgagatagtctttgccccagtcatagacctgcaccacacgcgggccaccctgagcatgcgcggcacccaaccattgcagtccgcgtccttcgcattcgaagaatccctgaggagcaaaagccctgcttttacgatatgtactcatagccgttccctccagcatggttgtgacgttttgcactcgtattcattgtagaagccgtgcatgttaccaattcttagtgctgttctacaccccaaccggtagggtgttcaacgtcataacacattacgtatagagaaatctcgaggaattatgaacctcttccaagcgattgttctcggcatcgttcaagcacttaccgagtatctgccggtatcgtccagcgcgcatatccgcatcgtcggtgatttgatgttgggctccgaccccggcgctgctttcactgccatcatccagattggtactgagctggcggttattctgtatttccgccatgacatcgccaatattcttactcactggttcgcatgtctgttcggcaagaacggcaaggactggaaggcccgcatgggccgtggcgacgactacgccacgctcggctggaatatcatcgtcggctcgattccgattgtgattcttggcttcactctgcagaacgtcatcgagaccacgctgcgtaacctgtggatcaccgcgaccgtgctgctgctgttcggcattctgctgtgggttgtggatgctcgcgccaagcagaccaagaccatggacgatatgacgtatcgtgatgcgttcctctttggtctaggtcagtccatggccctgattcctggcgtttcccgttcgggcggcaccatcaccgtgggccgtgcgcttggctatgagcgtgaggccgcagtgcgtttgagcttcctgatggccattcccgccgtattcggttccggtctgcttgaggctgtcaaggctgtcaaggactacaagaccgatgcgatgttccccggctggggtcccacactgatcgccatggtcatcagctttattctgggctacatcgtgatcatcggattcctgaagttcgtctccacgttctcctacaaggcgttcgccatctaccgcatcgccttggcagtggtggttgccttcctgctgatcgccggtgtgttgccggccatcgacccgtcagtggccgcagcggcttaaagaaacactgcatcgtcaataatgctcccgctggcaggagctggctcgctttgcgagtctgaaggtggttctgtctgggatacccagtgaccaccctcagtcggctatgccgacagctctcgccggcgggagcattattgtattctcaggtcagctacccatttggcgtaggaacgcctcggcctctttgacgagctgttccgcttggggcgcgcccagcgaggcctcggcatcggccttctgcttcaggtcataatcatgctcaagatgggtcacataatcctgcagctgctcgttgcaatgcactagtaccgatgcctgtgatttccattgttcagccttgcgttccaactcgctgacatcaaaagagaaaccgatgcgatgccccaaagcatcaagcaggcgcatggtgcccgccgcgcattcgtcgctgccgagatattggggaatggaaacccacatggaggcatggaacatgccacgttccgcaacgaaaatatccagcacggtggggatgcccacaggaccgttgtattcccggtctccctcacactgacaatcgccgtcgctcacggaaatgggcagaggcctggtatgggggcaatcagagaacatcgagccgagagtaatcacaccatccacatcgagttcttcagcgatggcgagactctggctgcagtattccttccagcggtagttaggctcaggcgcgatttgggcaaatattcgatgcccctcatcaagcacgatctcgtagaacgtagtctgcggccaaataagattagtacgaccggatacatggcacagcatgggacgagacacctgatagtcatagaaggcgtcgcaatctatatggcgaatctcacgggattcgtaatgcttgaccagataacggacgacgttcgaagccgcctggcaagcatcattccatccctcgaaagcggcgatcatcaccgaacttggggtattcgcatcttcactcatacctctagagtaacgtggacttgatgtcatatatgtttgcttcagccataagcgaggagtcaagaacggcacaccagaaacgacacgccgcagctggacgaactacacgcttgtgagtatagtaaacactcgtgctttgagcgagggaaattcttgtgaagcacatgcggacatagcttagttggtaaagcgcaaccttgccaaggttgagaccgcgggttcgagtcccgttgtccgctctaggtccgacgagttgacagaccttacggtgggttagccaagcggttaggcagcggcctgcaaagccgtatagacgagttcgactctcgtacccacctctcaggcagacgaagacattcgcttgcaggagcatgacccgggcggttggcgcagtggtagcgcacttccctgacacggaaggggtcacaagttcgaatcttgtatcgcccacgcaggccgaagcaattcggctcgcataactgaataccgattgatttcgggcgattggcgcagcggctagcgcacttcgttcacaccgaaggggtcgtaggttcgattcctacatcgcccactggaatccgcttctcacggcggaatcctttgcggacatagcttagttggtaaagcgcaaccttgccaaggttgagaccgcgggttcgagtcccgttgtccgctccaccaaaacctcgctccggcgaggttttttcgtattcgcagatggatttcctcactcggaggtgccgggtggaggggtgcgtggcccgactgtaggcttggccaaacggcctggagtgtgtcgggacatgcacccctccacccggcagcggtcagctcatggggaacggccggataatgtcgcacgcccaacctatcgtggcctacgttgattacccagtccaggcctgcacattagtaccgcgggccccgatagcaaaggacaaatcatggcgcaagctaccatctccatcacagtcaacggcgaagcgaaggaggtggaagcaaccactaccggcgtcgaattgttcgcagaagacaagaacatcgttgcggtcaagctcaacggcgaaaaccgtgacctgtacacaccgcttgccgacggcgacaccgtagagcccatcacgctcgattccgaagacggcctcgcgatcatgcgtcactcggccacccacgtcatggcccaggccgtgcaggaggtctatccgaacgccaagctcggcgtcggcccggtgatcaaggacggcttctactacgatttccaggttgacaagcccttcaccccggaagacctcaaggacatcgagaagcgcatgcagcgcatcatcaagtcctcccagtccttccgccgccgttccgtgaccgaggaagaggccctgaaggaagaggccgatcagcccttcaagatcgagctgatcgaagacaaggaagcacacctcgacccggccgtcgccaccgagatttccgagaaggagctcagcttctacgacaacgttgaccgtgacggcaatgtggtctggaaggacctgtgccgcggcccgcacctgccgaacacccgctacatcaaagctttcaagattgagcgttcagccgctgcctactggcgtggcagcgagaagaacccgaccatgcagcgcatctacggcaccgcttgggccaacaaggaagatctcaaggcataccagacccgtctggaggaagccgccaagcgagaccaccgcaagctcggcgccgagatggacctgttctccttcccggacgagatcggccccggtctggctgtgttccacccgaagggcgctgccgtgatcaacgcgatggaggactactcccgcgaaatgcaccgcaagcaccactacagcttcgtgcagaccccgcacatcaccaagggtggtctgtacgagacttccggtcacctgcactggtacaaggatggcatgtacccgccgatgcacctcgatgaggagtacgatgcggacggcaacgtgaccaagcccggcttcgactactacctcaagccgatgaactgcccgatgcacaacctgatcttcaagtcgcgccagcgctcctaccgtgagctgccgctgcgcctcttcgagttcggtaccgtgtaccgctacgagaagtccggcgaggtccacggcctgacccgtgtgcgtggcttgactcaggacgattcccacatctactgcacccgcgagcagatgaaggacgagctgaccagcctgctgaccttcgtgctgaacctgctcaaggacttcggtctgtccgacttctacttggagctctccaccaaggatccggataagtacgtcggctccgacgagatctgggaggaggccacccgtaccctgcgtgaggtcgccgaggcatcccacctcgacctcgtggccgacccgggcggtgctgccttctacggcccgaagatctccgtgcaggcccgtgacgccatcggccgtacttggcaggtttcgaccatccagctcgacttcaacctgcccgagcgtttccagcttgagtacatcgcgaaggacggcacccatcagcgcccggtgatgattcaccgcgccctgttcggctccatcgaacgcttcttcgccgtgctgctcgagcactacgctggcgccttcccagcgtggctggcccccgtgcaggtgctcggcgtgccggttgccgacgagttcgcccctcatctggccggtttcgtcaagtccctcgaggatgagatggtccgttgcgagatcgactactccgatgaccgcttcggcaagaagattcgcaacgcctccaagtccaaggtgccgttcatcctcatcgtcggtgaggaagacatgaacaacaacgcggtgagcttccgcttccgcgacggcagccagctcaacggcgtgccggtggatactgctcgcgagcagatcctcgccgtgatcgccaagcgcgtccaggtgaactccgccgacgacttcaacgccgctgtagctgagtaaaggaacacatgatggctgacgtgcgtgtcgatgatccggcggacttcccgcctcaggaagacacggtcgaacgactgtggactccgcagcgcatgacctatgtgctgcgcaacagcgaggatcgcccaaccaagcccaagacgaaggaatgcccgttctgtgccggacccaaaaaatccgacgaagacggcctcatcgcctggcgtggcacgcacgtgttcgccatcatgaacctctacccatacaatgtcgggcatctcatgatttgcccgtatcgtcacgtcggattcatcaccgaactcgacgatgccgaactgttcgaattcgagaaggccaccaccctcgccatgaaggtgatggagaccgtctcccgtccggacggatacaatatcggcatcaatcagggcgaggtcgctggtgccggagtcgccgcgcacctgcaccagcatgtggtgccgcgttggaatggcgatgcgaacttcatgcccatcgtcgcccagacgcgtaccatgcctattctgctgtccgaccagcgagacgcctatgcccaggcattcgaacagctggccccgcagtatcatttgccgcttgcctgaccgggtgcggcatccgcgcaaccggttttatcggtacgcgcaataagacaatcatcggaaacattacgggtatgtctgattaacggcctacaatcgtttcgtttgacatcatccgtttattactgctaggagcattatgtcaggtcattccaagtgggcgaccaccaagcacaagaaggccgccatcgacgccaagcgcggcaagctcttcgccaagctcatcaagaacatcgaaatcgccgcccgcctcggcggtggcgacccggacggcaacccgtccctgtacgacgccatctacaaggccaagaaggcctccatgccggccgacaacatcgcccgcgccgtcaagcgtggtgccggtgacgaagacggtgccgccaactacgaggacatcgtctacgagggctacgctcccgctggcgtgggcctcatcatcgagtgcctgaccgacaaccgcaaccgtgcggccgccgaagtgcgttccaccctgaccaagggcaacggctccctggccacctccggctccgtgtccttcaactttgagcgcaagggccagatcgtggttccgtccgaaggcgtggacttcgacaagctgttcgagaccgcagccgaggctggcgccgaggacgtcaccgatgacgatgaggtctacaccgtcatcaccggcccgtccgatctgttcaccgtgcgcaaggctctgcaggacgccggtttcgactacgattccgccgaccaggtcatgcagccaaagaacgaggtcgagctgagcctcgaggatgcccgcaaggtgtccaagctcatcgacaacctcgatgacctcgacgatgtgcagaacatctactccaactggaccgcctccgacgaggtgatggcccagctcgacgaggagtaatcctcgtgattatccttggcgtcgaccccgggcttacacgctgcggggtcggcgtgatcgaagccggcgagcaccgccggctttcgtttattcacgtggacgtggtgcggtcctcgccggacatcacccaggatctgcgtcttttggccatctataacggcctgtccgagaagatggatcgctttgcacccgatgccgtgtccatcgaacgcgtgttcgcccagtcgaatcgcaacactgtgctcggcaccgcacaggccgccggtcttgccatgctcgcagccgcgcaacgcaatattcccgtggcgctgcataccccgaccgaagcaaagctggccatcaccggcaatggccaagctcagaagatacaggtcgaacgcatggtgacgcgcattctcaatctgaccaagatgcctacgcccgccgatgccgccgacgccctggccttggctatctgccacgcactgcgcccagctggagctctgcagggcggcgaacgcgagcagcatctgaccgccgcgcaacgccaatgggccgaggccgcgcagaactccgcgcgccgccgcatgaaccacgaccgaggcatgtagtatactttcgaacagttgttcgaagccttaaaggagcgtctgtatgatcggcatgctgaccgggcgggtcgaatcggttgaagccgataccgcactgattgatgttgggggagtgggatacgaggtacgtatgtccgccaccgacctcagccgtctgcacgccggaacggaggcgcgcgtctacacgtatatgaatctttctcaggatgccgtcacgttacatggcttccttgatcaggcctccaagaaaacgttcctgcagctcatcaaagtatccggcatcggaccaaaggtcgcgcagtcgctgctctccacactgacggctggccagcttgccttggccatcgccgacaacgatgccgccgcgctggccaaggcaccgggattgggcaaaaagggtgcccagaaaatcatcctcgaactcaagggctccattgacctgagccagatcgagggagcttcaccgtcaggcgccaaggttcaggcgcaggtggacaccggcatggagcaggtcatcgaaggtctgatttcactaggctggcgtcagcaggacgcccagcaggccgtggctgaagcctgcgaggacaacgacataccgacaccgcttgccaccgacgatgtgccgcgcgtgctgcgcctggcactcgcactgatggataggggccgctgatgagtgaggacatgaactacggcacatccaataccggggccaatgaagaatcattgcgtatggtgtcttcacaaccgataggcaacgagccggtcagtgatgaagagctccgcccgcatgtgcttgaggggttcatcgggcaaccccggctcaaggcccagctccagctgtttcttgacgccgcccgcaaacgtaacgtgccgccggatcacatactgcttgccggccctccaggccttggtaagaccacattggccatgattgtggccaatgagcttgaggtcccgattcgcgtgacctccggccctgctgtgcaacatgccggcgacctggcgtcaatcttgagttcgctggataccggcgaagtgctgttcatcgatgagatccaccgtctgccgcgcgcagccgaagagctgctgtatatcgcgatggaggatttccgtgtggatgtgatggtgggcaagggaccgggcgccagctcgattccactgactctgcctcgcttcaccgtcattggcgccaccacccgcgaaggtatgctgcccagcccgttgcgtgcgcgtttcggcttcaccgcgcatctggacttctatccgcatgaggagttggagaagcttatcgaacgctcggcaagcgtgctgggggtcaaccttgatgagggttccgcccatgaactcgcattgcgttcccgcggcacgccgcgtatcgccaaccgtctgctgcgccgcgtgagggattgggccattgtgcatgaccttatcgtcgtgcacccagctgatgtcaaagaggccttggcgctgtaccagattgattccgaaggccttgaccggctggatatcgccgtgctgaacgccattgttcgcaatttcaacggtggtcccgtcggcttgaacaacctcgcggccatggtgggcgaggaatcggaaaccgtggaaaccgtctgtgagccgtatctggtgcgcgagggattcatggtgcgcacgcctaaaggccgcgtggccaccgagaaggcatggcagcatctgggcattacgcccaaggatgatgtcagcaagctcttctagacttttcgtgtttgcacacctgacggttcatagccataaccgttcgttttgaaggagtttgcccatggatggttcgtcatcttcctacatcatgcttgtcgtcatgatcgtcgtcttcggcggcatgatgtggtggcagtccaagaaatccaagcaggcccagcaggagaagcaggattttcgtcgtaacctgcagcccggtactgaagtcatcaccatcggacaggtgattggcaaggtcgtcgaagtcgatgaacagtacgaggagatcgtcatcgactccgaaggctccaggcttcgcttcggtttcaatgccatcgcccgcgagtatgtgcgtcctgcctacgtgtctgacgacgaagttgacgagaacggcaacccactgaccgacgaggacgccgagacccccgcgaatgacgatgccagccaggttccgattgaggcttccatcgagtcctctaaggccacggatgctgaggcggacggcggcaacgagaccgagacgaagtaaactgttcgattcggtaccccataagtacgagaaatacgaggcgagcacgcatggcacagtctgatatcaccatcgacgcattggacaaggtaggcaaggaggacgccgaatatctggtgtctctagtgcgttccgtgccgggctttcccaaggaaggcatcattttccgtgatttcatgccggtgctcgccgacgccaaagggctgaggattctgctcaatgcgcttgagcaggccctgccggttccacccagcgagttcgattccatcgcaggcctcgaatcccgcggattcctgtttggcccggccatggccgctcatctgggcaaaggattcatcgccgtgcgtaaagcaggcaagctgccgcccgaaaccattggcgaatcctacgacctcgaatatggcacggcaagcgttgaaatcgagaccactgccgtttccaagggcgaacgcgtattgattgtggatgatctcatcgccactggtggcacggccaaagcggctaccgaccttatcgaaaaggccggcggtactgttgtgggcttcagtttcgtgatgcgtttggagggtcttgacggcctgagcaagcttggttcgacaccaagtagctcgttgatctccatgccggcctaagaattcgcatagttagtttttcgggattcggcatggatgcattcgcgcatcaggccgattcattatctagtcagggaaggatccatggatctttacgaataccaggcacgtcagctgcttgaggagcaggacatccccaccccgggtgccatctttgctcagaactcccatgaagtcgccgaggctgcggataagatcggctacccgtgtgttatcaaggcgcaggtaaaaatcggtcaccgaggccaggccggcggcgtcaagatcgcgcataaccgcgatgaggccatcctggaatccgaatccatcctgccgatgaccatccacggccataaagtatccggcgtgctggtggccgaagccaagaacatcctgcacgaatactatgtgtccatctccgtggatcgcacctcccgagacttcgacgtgctggcgaccgccaacggcggcaccgaagtcgaggaaatcgccaaagaacatcccgaggcggtcaagcgtctgcacatcgatgcgctcgacgacttcgatctcgaggctgcgaccaagatggcagcgagcattggtttctaccatgctgatgtcgatcaggcggcgcagatcctgctcaagatgtggcagtgcttcaaagacaacgacgcgacactggtggaaatcaatccgctcgcaaaaatcggtgacccggatgacgaatccaccaagcagctgagcgcgctcgatgccaagatttccttggatgacaacgcggcattccgccacgacggttgggcccgtttcgttgatccgatcgttcccgacccgttcgagcagcgcgcccgtgagcatgggctgcattacgtgcatctgcacggcgaagtcggcgtaatcggcaacggtgctggcctggtcatgagctccctggatgccgtatccggcgcgggcgaagagcaggggagcggcatcaagcctgccaacttcctggacatcggcggcggcgcatccgcgactgtgatggccgaaagcttggaaatcgtgctgtccgacccgcaggtcgagtccgtgttcatcaacgtgtacggcggcatcacctcctgcgtggaagtggccaacggcattctcgaagcggtcgccaagctcggcggctccaagcccatcgtcgtccgattcgacggcaatgccgcagccgaaggcctgcacattctggccgaagccaataatccgaatattcacgtgtccgagaccatggagggtgcggcgcagaaggccgctgaactcgccgctgagtcgacccagtccaaggagattcgctgatgctgttcgttgaagatagtacccccgttatcgttcagggtatgaccggtcatcagggcatgacccacaccgcacgtatgctcaaggccggcaccaacatcgtcggcggtgtgaatccgcgcaaggcaggcatgtccgtcacgttcccggccgccaagaacggcaccgacgtggatgtgcctgtgttcgccacctgcgacgaagcccgtgaagccactggcgccaaagccagcgtggtgttcgtgccgccgaagttcgccaagtccgccgtcgtcgaagcgatcgaggccggcatcgagcttatcgtggtcatcaccgaaggcattccggtagcggattccgcctactttgttgagctcgccctgcgcaagggcgtgcgtattatcggcccgaactgccccggtctgatcacgctcggcaatccgggcgtcaatctgggcattattcctgatggcatcgttggccgcggcccgctcggactggtttccaagtccggcaccctgacctaccagctgatgggcgaactgtccgatatcggcttcaccgcatgcctcggcgccggtggcgatcccatcgtcggcactacactgctcgaagcgctgcaggctttcgaagccgaccctgacaccaaggccgtaatgatgatcggcgaaatcggcggttttgccgaacaggatgccgctgcttgggccaaggaacatatgaccaagccggttgtggcctacatcgccggtttcaccgcccccgaaggcaagcagatgggccatgccggcgccatcgtctccggcggcaagggcaccgctcaggacaagaagaacgcgctcgaagcggccggcattcccgtgggcaagaccccgggccaggctgcccagattatgcgtgacgtacttgccaaggcttccatcaactgatcggccacaacccatcgtgatgaaagacaggattcgccaatgggtacgaggtgcggcagccgccctcgtatccatgaccatctatgccatcgccttgggctgttacatcgcactgatgttgctcgtcatctccatggaggagggtggcgacaatcttaccgctggcaccactaacctgacgcaggccatcgtgctgctcagcgagggatcggggttcagcaccgactccttcacgctcaccatcacaccgttgctgctcaccgtgctgctcatatggcttattgccacttgcatagcacgattcaaagcattcgctgtgcattcctatgttgtgggattggtggtatggctggccatcaatgcggtattcgcttcatcggtgcaggtaagtctgagtctggtcgacgagcaatggatgatattgctcaagagcgccgcgacattcactgtggcgtatcttggagccgctctgccacagtccagtagggtcaaagcggcaatcgcatggatgcgcgagcaggtttccgagcaagtggtcagatgcctgaaatcaggcgttattctggcattcgccatactcgctatcaacctgctcatcggtctgattaccgtcatcacatggaccgtacgcaatcatgccgcagtggtatccgtattcgaattgtccggcatggaaaacggatcgcgcatcctcaccacgcttgccatgctgatttggctgccgaatctcatgctatgggcgatctcttggttgttcggagcaggattctccattggcgaactcgccaacttcacactctggatggggcagtccaacggtctgcccgcagtaccggccttcggcatactccctgagcccattgccgataatctatggcgcacagtaatgctggaaattccgctgggcatcgcctgtattgccggcctactgatgattatcctgccgcagggattcgcctgccgtccactgaatatacgagatgcttccaagcgcggctccgtattggcatccctcatttatgccgctggctcgttctgcttgagcgccatgctcacctcactgatcgcaacgctgctgttcgccatttccaacggatcattgggccagcataggctcgcccatgtcggtgtggatgtcatggcctccacgcgtgccgtaggccatcctatggcatggggacttgccgtggcctggctcatcgcaatagttggcacaacgcttgttttttcgataggctggataatcgagagagtcaaggcttctcgcaccacgtcccgtcaaaccgtcaatccccgtcagacacggtctgatgtcaacgtgcaacaatcacaagaatccaaggaggaacaggatgacaaacacgaaccggccgatacgtcgagcactggtttccgtctttcataaggaaggcatcgaagttctcgccgacgcgttcgtgaaggcaggcaccgaggttgtgtccaccggttcgaccgccaagaagctggccgaactgggagttcatgtcactgaggtgtctgatgtcactggattccccgaatgcctcgatggccgcgtcaagacgctgcacccatacattcacgccggcattctggccgatatgaccaaccctgagcatgccaagcagctcgaggagttcggcatcaagccgttcgatctggtggttgtcaacctgtatccgttcgccgataccgtgcgctccggagccaatgaggccgacaccatcgagaagatcgacattggtggcccgtccatggtgcgaggcgccgccaagaatcacgccaccgtggccatcgtcaccgatccggccgactatgcgctggtcgctgcccgtgtggccgatggcaccggtttctccctggatgagcgcaagtggcttgcagccaaggccttcgcccacaccgccgcctatgacgccaccatcaatgagtggaccgccaagcactggccgaagccggcttccctggacgccgtcgaagtggacaaggacgatcagggcaccgaggtcgatccagccaagttcccggcccagttcacccgcacgtgggatcgtgcgcacaccctgcgctacggtgagaactcccaccagcaggccgctctgtacgtggacccgctcaaccagaccggtttcgcccacgccgagcagcttggcggcaagccgatgagctacaacaattatgtggatgccgacgccgcatggcgtaccgtgtgggatatggctccctccatcgccgtggctgtggtcaagcacaacaacccgtgtggtctggccatcggtgccactgctgccgaagcccacaagaaggcccacgcctgcgacccgatgagcgcctacggcggcgtgatcgcctgcaactccacggtcacccttgaaatggccgagagcgtgcgcccgatcttcaccgaagtcatcgtcgcccccgactatgagccggctgctcttgaactactgcagaccaagaagaagaacctgcgcatcctcaaggtggccgagccgccgaagggccacgaggccatccgtcagattgacggcggtctgctcgtacaggacaccgatttaatcaacgccgttggcgatgatccggatgcgtggaagcttgtggccggtgaagccgccgatgatgccacgctcaaggatcttgtgttcgcatggcgtgcgattcgctgcgtgaagtccaacgccattctgatggcccacgatcaggccacggtcggcatcggcatgggccaggtcaaccgtgtggattcctgccatctggccgtcgaccgcgccaacacactggctgacggcgccgatcgcaccaccggtgcggttgccgcttccgacgcgttcttcccgttcgccgatggcgctcaggtgcttatcgatgcgggcgtcaaggccatcgtgcagcccggcggttccatccgcgatgaggaggtcatcgaagcggccaagcaggccggcgtgaccatgtacctcaccggtacccgccatttcttccactgatcggtacttctggctcccgctggcgggagctgtctcgtgaaacgagactgggggtagtccaccgtgaaccatccccagtcagctcccgctggcagctcccgttagcgggagccatagtattaagagaaccaacacatataagaaagccaccgcaatgcacaatcatccatatgtttccgaagctcacgagggtaagccctggtttgagtggattgtgcttgtcgtcgtcgttgtcgccacggtggttgccgctttcggatacacaatggccgccacagtaatcgttgctgtgacggccatcattaccgggctcattcgcttgacattgcgagagaagagcccctggaaagtacgctcagtcgcgttcgattccttcatcggcattgctctcggcatcggcctgctgatcacgtacttcagcttctacggcctgctcggcaacgccatcttcggctgagtcctctgcagcctgctcatcggcagtttcgaaatcagccatgtcgccctcgtcagtcggctcagccttgggcttggcagtggtggccatctgcacgatgatcatcaccaaagccacaaccgcagcagccagcaccggagcgatccagaacacccacagctgctgcagcgggttctgcgtcagaccctcattcacgacggccacggcgataccggtggaacgggccggattcagaccggcgccggtcaccgggtagctgatggccacggcaatggcgtaggcaatgcccatcgtggctgtataacgatcggagccttcaccgttcttgcccatggtggacatggcggcagccaccacaatcagcgaggcaacgacttcgacgacaatcgccaaggtgatggagaacgtgatgccatactgggtgagcagcgagtaagacacggagcccttctcgaatccgttgacagcgggggagagccagacggtcgaagtcacctgctcggaagtcggcagcagcttgaccacggcaaagcctgcggcgatggcgccgatgacctgggcaatcacatacaggatgccgtcaaccagcttggtcttggaagccagtacggcggccacagtcacggccgggttgaactgtccgccggaaatgcgggagaagatggcggtgactaccgcgtaggccaggccagtggccacagccatgaataccacgttgacgccgtacacggcggagccccaggtggagaacgcataaatagcaaagcacagcaggaaacttccggccagttcagcgcacacgcgcaggcccagcggctgttgcttggtttcttccatgattcaatatccttttcatcgatatacgaaaggcggcgaaccgcacaaacgtttgcaagtctagcagtagtccgccgctgcggtatgatatataggttggaattggctgagaaaatcggccagccaatcaaataccaccatcagaattgacagtaacgttcaaactgtccggccacgttgggagaacgatgccaaacgcatattcccgcgccagaagcgcgcatgatgattccaatgccattcgactgcagaagctgcttgctcaagcgggcttcggttcccgccgcaagtgcgaggatatgatcaccgaaggtcgtgttgaggtcgatggcgaacttgttaccgaactcggcacccgcgtcgacccgcataagcagcaggttcgcgtggatggttcccgagtccgggtcaacccaaatcacgttaccttggctctgaacaagccccgtaaggtgctttccgccatggatgacccgaaaggtcgctacacgctgcgtgacattgtgggcgacaagtatgaacgcattttccacatgggccgtctggattacgattccgaaggccttattctcatgacaaatgacggcgaattgtcgcagcacgtcatgcaccccaagtacgaggtggaaaagacttatatcgccacgctggaaggccgcatctccggcacggtgtgccgcaggctcgtgaccaccggtgtacagctcgatgatggatggattaagctcgaccactgcgcgatcattgattcctcccgtgacttcaccatggtcaaagtggtgctgcattccggcaagaaccgtatcgtgcgtcgtatcttcggttccatcggcttcccggtcaagcgtctggtacgcacccaaatcggcccgatcaagcttggtgagttaaagcccggctcataccgcgtgttgtctcaggccgaggttcgttcgctgtccaaggaggtcggactgtgattcgcgttgccatcgacggccccgccggcgtgggcaaatcatccacgtccaaggcgctggccaagtacttcaactatgcatacctggatacgggcgcaatgtaccgcgcctgcgcgtggtggtgcctgaaaagcggcatcgaccttgatgccgagaccgtggatgagcgtgtcatcaccgaaacggtgggggagttcttcaccggagaccatttcgatatttccgtggatcctgacgatccccgcgtgtacgccgatggcgaggacatctccgaggcgattcgttccactgaggtgtccacgcacgtgtccaaagtgtcgaacgtcattccggtcaggaacgtgctcattgcggcgcagcgcgcgtacatcgcacgcgaggcgtcgctcgattccttctctggtggactgggtgttgtggccgagggccgtgacatcaccaccgtggtggctcctgatgccgaagtgcgtattctgctgaccgcccgtgaggaggtccgtcaggctcgccgcaccggtcaggctgtcaagggcgtgggagccgaggatgttgccgcacgagataaagccgattccaaggtcaccagcttcctgagcgccgccgacggtgtgaccaccatcgacaactcggacatggacttcgaacacacactggatgtgatgatcaagctgatcgaagatgccatcgagaatcaggaatatgagcgctatgccgccaatcttgaaggctacgatctcgatgaaggcgacgaggatctgatttccggccgtggctttgaagacggagcccacaagtccggccccaagccggtcggcgtgctggctattgtcggtcgcccgaacgtgggcaagtcctctctggtcaatcgcattcttggccgccgtgcagccgtggtggaggacacccccggcgtgactcgtgaccgtgtgagctatgacgcggaatgggccggaaccgatttcaagctcgtggatactggcggctgggaagccgatgtcgaaggcatcgaatcggccatcgcctcacaggctcaggtcgccgtgactttggccgatgccgtggtgttcgtggtcgatggccaggtcggtatgaccaccaccgacgagcgtatcgtcaagatgctgcgcgcctcgggcaagccggtcgtgctggccgtcaacaaaatcgacgacaacgccagcgaataccttgccgctgagttctggaagctcggtctcggcgaaccgtactccatttctgccatgcacggcaggggagtgggcgacctgttggacgtggcccttggcaagctgaaggaagcggagaaggcttccggttatctcacgccgtccggtctgcgccgcgtggctctagtgggccgcccaaatgtgggcaagtcctccctgctgaaccaactggctcattcggaacgtgccgtggtcaacgatttggccggcaccacgcgtgacccggtcgatgagatcgtcgacatcgacggtgaagactggctgtttatcgacaccgctggtatcaagcgtcgccagcacaagctcaccggcgcggaatactattcgtccctgcgcacgcaggccgccatcgagcgttccgaactggcattgattctgttcgacgcctcgcaacccatctccgatcaggatttgaaggtcatgtccaccgccgtggacgctggccgtgccatcgtgctcgtgttcaacaagtgggatgcgatggatgagttcgacaaacagcgtctggaacgtctgtggaacaccgaattcgaccgcgtgatgtgggccgagcgtgtgaacttgtccgccaagaccggttggcacaccaaccgtctggctcgcgcgatgaacactgctttggaatcctgggatcagcgtattcccaccggcaagctcaacgcgttcctcggcaggattcaagccgcccacccgcacccgctgcgtggcggcaagcagccgcgcatcctgttcgccacgcaggcgtccacgcgcccgccgcgcttcgtgatctttgccaccggcttccttgagcacggttaccgccgttacatcgagcgtcagctgcgcgaggagttcggctttgaaggcactccgattcagatctcggtgaatattcgagagaagaagcgcaagtagtggttatcccttgcggtgttgtctccgttaacccatgggcgcagcaccgcaggacacgcaagacgtacgatgatttgccaaatcgtatccatgtggtaaattatctactcggtgcttttgcaccatcgggccgtagcgcagtttggtagcgcacttgactgggggtcaaggggtcgcgggttcaaatcccgccggcccgactttctaagtccggaatcttaatgattccggacttttccttttctctgacaaggagtacgcgatgttggcaaatttcaccgaggacaaggatctgggccaaatcagggtcattgccagtgatatggactgcacgttgttggctgacgacggctccatgccaccccacatggatgctctcatccgcaagctcgatgcggcaggcattacgttctgtgcggcaagcggccgtccgaactacacattggccgagatgttcccggaaatccagaaccagatggcgctgatgtcggacaatggcgcggccatctactgccgcggcaagctcatctatgagagcctcattcccgttgaacagtaccaggacatgattcgttacacgctggccgacggacgcggatgcccaaccgtctgcggcatcgaagcctgctatatccgctcatgcgacgagcgatacgacaactatttccgcacgttctacaaaaaaatcgtctacatggacgacctcaccgaacttgaccgcgatgtaaacaaatacacggtattcttccctgataataattccgaagaggtctaccgcgagacctatcgcgatgcgtggtcagaccgttacacggtaacgaacgccggcaaaatgtggatcgacatgatgaatcccggtgtggataagggctcggcgcttgctcgcctgtgcgaatacctaggcgtggatatcgcggattcctgcgcgctcggcgatacctacaacgatattcagatgcttgaggcggccggtcacggctgcgtagtggccaatgccgaagagcacatgcacgcgcatgccgactggctggcaccgagcaacaacgataggggcgtcgtcaccgtgattgataccattctgcaagcccagaaagccgcctaattcatggattattcactggtgaacacgcaccttgtgtactgtcctgagccatacggggttacacttgttccttggaatatgacgaaagggacctgaattgaccgaactgaacaatgaagcccagctcagcgtaaacgatgatgccaccgccgagaacaccgcggaagcccacatcgaagaggttttctcacattccgccgccaagatgcgcgagaaaggcatgagcgaaaccgccatcaatcaattccatcatctctatagcgtatggcagcacgaagaggcatcaaactggatccgagaggacgatgtggagccgcttgagcaggttcccagcttccgcgatgtttacgagaccatcaatcacgacaaggccgtggacgcgtttgcaaaaaccgcgttcctcaagcttaacggcggtctcggcacatccatgggtctggaatgcgccaagtccctgctgcctgtgcgccgccacaaggccaggcaaatgcgcttcatcgacatcatcatcggtcaggtgctgaccgcccgtacccgtctgaacgtcgagctgccgctgaccttcatgaactccttccgcacttcggctgacaccgtgaaggtgctcaagcacaaccgcaagttcacgcagcacgaaatcccgatggaaatcatccagcatcaggagccaaagctggtcgccgccaccggcgagcccgtcagcttcccggaaaacccggatttggaatggtgcccgccgggtcacggtgacctattctccaccatctgggaatccggtctgctcgatgtgctcgaagagcatggctttaagtacctgttcatctccaattccgataatctcggtgctcgcccctcccgcacactggcccagcatttcgagaacaccggcgcaccgttcatggcggaggtcgccacccgcaccaaggccgaccgcaagggcggccacatcgtgcgggacaagtccaccggtcgactgatgctgcgcgagatgagccaggtgcatcctaacgataaggcagcggctcaggacatcaagaagcacccgtacttcaatacgaactccatctggattcgcattgacgcactcaaggccaagctcgctgaatacaatggagtgctgccgttgccggtgattcgcaacaagaagaccgttaatcccaccaacccggataccgagcaggtcattcagctcgaaaccgcgatgggcgcggccatcgccctgttcaatggtgccatctgcgtgcaggtggatcgtatgcgctttcttccggtgaagaccaccaacgatctgttcatcatgcgttccgatcgcttccatctgacggacaactacgaaatggaagacggcaactacgtcttcccgaatgtggaacttgatccgcgctattacaagaacatccatgacttcgacgaacgcttcccatacgccgtgccatcattggccgcagccaactcggtaaccatccaaggcgactggacgttcggccgtgatgtgaccatgttcgctgatgccaaactcgacgatcagggcgagccgcgctacgtgccgaatggcgcatacgtaggcccgcaaggcattgaaccggacgattgggtctgatttcagcaagcatcttggaagaaaaacgacgttattttcgtgaaatggtgtgcagtcgcggaaaaagcctctaagatggagggagtatgagacaaactcatgcacacttataacgaaacagtaactacacgtgaggactaatggcagagggcacaagcggacgtcgtcgtttttccgacaaatggggcaagcacgagctggatgtactggccgtactctcatccgcattcccgcaatggcttacttcccgccaaatcgcacagcgagtcaaggcttacgccgattcctatggggagctggccgatcaggcagctaaggcggcattcgccaagcaattccaacgcgatcgcgccaagctcgccgccatgggcattgccatcgaatcgcgccagcctgaatattcctccaagtccgaaggtcaggatttcgcctcgtaccgcctgcaattgggcgatgaacctcgcatccgtctgatgttcgaagccgaagatatgccggtattggccgccgccaactatctggcccgttccatgtctatctcctccgagcccgatcaggctcaggttgcggcacgtgcttcacgcaccacacctcgtgtgcctcagaccccgattccgggtcttggtctcgattccatcgccccaggcctcggcacccagcatattccggacaccttggtcaaggtcatcgattcgcgtcgattcgctgcgaccatcgatgtggacggcgaacacctgaacgtggcatacaccgattccgatgatctggccatgttcgtactcgaacacccaggtgccaccatcgtcagcccgcaggaagccgtggatgcctatcatcgtcgtctgcacgcagccagtcagttcacgcttgccgacgagtccgcaagcccggtcagcgcttcggtggtctctcccgcaatcagccgtgacatcagcgaaccgggtgatcccgaatccatcaaggcccagaacaagaaaaacggttccgcattccagaccggcagcgaggtcgaccgtcgactgcgtctgatgctgttcctgtccgcccatcttggcgaagagttctccatgggggagctggccgaacgctttatcggcaagccgaagaacgacgatgaactcaagaagttcgtcaacatcattcataaggacatcaacacactgaccacggtgtccgatgatggggagatggccggcagccagttcttcgacatcgactggccactgttggatgccgaaggcatcgtgtccgccaccaactcgctgggtcttgagcgtcttgccggtatctcaccgcagtacctgagcatgctcaccgcatcggtgagctatctggcacattccccgctgctgcctgacaagcagcgcgcccaggccgaagacctttacgagcgtctgcgtcagcatgtgagccccggccagaccccgtggctgagccttaccggttatgagcttgaaccgcgcagtttctccgtggtcaagcgcgctatcaacaccgactcgctgctggatatggaatacaccgacagcaccggacgcacccgccgcaagctggtggctccctccaagattttcatcgacgagggtgtctattacacggctgtctacaccgatgtcggttccgcggcacccaaggacaagaaggcctacgtctccaaagacaagaccatcgacaaggccaacggcaaaccccgcacttggcaggtgctgcgtctagcacgcatcgaaaaggccgaactggtcaagccgaccaagaaaattgacgtaccgaacatgccgatcaacgagctgcgcaagtggagctttgacaacggcaccgaagcggtgttcatcaccgatcagcgtgagttgccgttcatcaagaccctttccggtgccaccgtggagcagtgcggtgcgggggagaaggtgcatctgactgtgtcctccgattcctggttcgtggcattctgtatcgcccatgcgcgccacatcaccgcagtcgcccccgaaacgctgcgcacgatgattatcgcccgtgccgagcgagagctcagcatcagcgaaaacaagtaaggagcagacgtcatgccttggtggatatggccgattctggttctgttcatgttggccatgatcgcggccggactagtatacgcgggactacatggattccatgccgtgcaggatatcgcggagattggcgacagacttggcgagcgcgtctccaaaatgggggagcccggcgattccacagaggagagcaaaccgccgctgttcacgcagccgctgaatgtggcgcaggaacgctatgtcgacgcccatgcagaagtgatacagcgcaagaacgtcactcgcgaacgccatatcgcggcttggaacaggtggaagcagttcaacaagtagacgactagtcggaaagcatcatggcacgtcaccctcaccatcaggaaggcgattcttcccgaacgcttagtcctgcccagcgatacgcatcattccagaaagccaataaacacaaagcatcggtcgcggctcgttttgccgctacactgccgttcgatcttgacgatttccagaccgaagccaacgacgcattggaggccggcagcaatgtgctggtcgccgcaccgaccggcgcaggcaaaaccgtggtagccgattttgccatctatctggctcaggaacgcaacgtcaaagcgttttataccactcctatcaaggctctcagcaatcagaaataccatgatctggtagacgtatacggcccggataaggtaggcctgctcaccggtgacacctcgatcaattccgaggcggacatcgtggtgatgaccaccgaagtactgcgcaatatgctctacgagcattccaccacgctcaccgcactgcggtatgtgattctggacgaggtgcattaccttgccgaccgcttccgcggtccggtttgggaagaggtcatcattcacctgcccaagacggtgaaaatcgtgggattgtctgccacggtgtccaatgtggaggatttctccaactggatcgcatccgtgcgcggcgagaccaagctggtcatcagcgagcatcgcccggtgccgcttgaacagcacgtcattgtgcaggcggatgaacaaaccgagccggaggtgctggatctgtatcgcagggacggcaacggcaaccagaccacgaagctcaacgccgagttgatcaaccaactcgaccaactggaccgcaaggcggcacgccgccgtggtgaggaacggcccgacaagcgcaggggattcaaaggcaagggcggaaaagggcacaaggatcgcgtaccacgcccggagcgacacacgcctcgccgttgggccgtggtcgacgagctgaactttctgggcatgctacccggcatctacttcatcttctcgcgcaacggctgtgatcaggcggtcgagcagtgcatcaatgccggactggaactgaccaccgatgaggaagtgaccaggattcgccgcatcgtggacgagatgatggaaggtcagctcgcccaagaggatctgaaggcgttgcagttctccaagttccgattcgctttggaagaaggattcgcctcacatcatgccggcatgatcgccctgttccgccaaattgtcgagcgcctgtttgaagagggcctcgtcaaaatggtgttcgccacggaaacgctggcgctgggcatcaatatgccggcacgctgcgtggtggttgagaagctggagaagttcgacggcaccggtcacgtgggtttgactcccggcgagttcacacagctgaccggacgtgccggccgacgcggcatcgacaccatcggccatgccatcgtggtcgaccatcatggattcgtgcccgccacggccgcggcattgtcttccaagcgtgtgtatccgttgcattccagcttccgtccgacgttcaatatggcggtgaatctgcttaattccagcgactatgggaccgcacgaatcaccttggatcagtcttttgcccaatgggaagccaatgaatccgcctggcagctggaatcgcagatcaacacgctcaccaatgcattggccggatacgaacaggcgttcgcctgcaatcatggcgatttcaagcagttcatgacgttgcgtatggagctcagcgacatcgagaaggatggccgccgcaaactcaagcacgaggtgttcctgaccgatcaggacagatctcgcgctttccaggacctcgacaagcgcatccagaagctgcgcaaggccgagcacgcgcatccatgccgcaattgccccgacctccagcagcacctcaaatgggggcaccgctgggcccgtgagacccgggaactcaatcgggtgaagtatcgttatgactcgcgtaccggctctgtggcacgtcagttcgaccgtatctgcgacatccttacccagctcggctatctggagcggcatgatgacggcaacggccgtatcgacgtgaccctgaccgaaaaaggcctgctgttgcgccgtatttacagcgagcatgatctggaactctgcgaggcgctgcttgccggcactttcgacaagctcgatgccaacgggctggccgcggtactttcctcgctggtgtacgaggccaggcgtggctcggacggcgaaccacggcattatccgggcggcatttccggccctatcgccatcgcatcgtccaaactgcaaggcatctgcgcggatatcaacatcctgtgcgaggatcacagcctggaagaaatgcaccagccggacttcggcatcgtcgacatcatgtacgaatgggccgacggcggttcgctgggtgcatgcctgtacggcacggacatgaccggcggcgactttgtgcgcaccgccaaacgactggccgacgtactgcagcaaatcgccgtggcgcagccattgccgttcgatgggggagaacggttggcggatatcgcccatgaagcggctgatcgtgtgaaccgcggagtcgtggcctattccggcgtcgattaacctttgcttggccggctacaccggtcagtcactagcgaacagcggaatagaagccaagtccgaactgttgcgtaaattagtacggtcgaagatttttcaaggaggatgccaatatggcagaacgtagcctcaggggcatgagcatcggcgcgaaatcgctggagtccgatgacaacgtggatttcgccgcgcgaaacgatgtggcgtatgtgtgccctaagggtcaccgcactattctgccgtttgcggaaggtgccgagattcctgacgagtgggaatgccgctgcggttccgtggcccatcgcgaaggcgatgacgaccgtgaggccgatgagatcaccaagccgacccgtacgcactgggacatgctgctggagcgtcgtagcgaggaggagctcgccacgctgctcgagaagcgtctgcagatgcaccgcgacggttggattcccgattacgagtgagccaacaacacgtgaacttgatgcccagtcaaaccgactgggcataatcattgctgaagcaatcttgcgaacatgaacaccatagtgaaacaggggagtggacctcatatggcacagcatccgaggaacgtggtcctgctggacctcgacggcacgcttaccaagtccgacggcggcatcatcgcatccgtcatcaagacgttcgaggaattgggtcgcccggttcccgacgatgccgagctgcatcgtttcattggtccggccatcatcgaatcgctgcgacgcaaccatgtgccggaggaggagcttgaccgggcggtcatcatctaccgcagctactatgcggatcgcgcagtgttcgatgatccgaacgagcccggcaacaaagttcccggccgcttggtgaacgtcgtgtttcccggtatccgcgaacagctgctcaagctgcgtgccgacggctattatctggcgttggccagctgcaagcccgagtaccaatgcgttccgatctgtgagcatttccatctgaccgaattgctggatggcatttatggcgcttccaaggacaactctcgcttggataaggatcaggtcatccgttattgctttgacaaaatcggttttgatgcttcggcaggggataaggccgtgatgatcggcgatcgctacaccgacatcgatggcgcacacgcctgcgggctggacaccatcggctgccgttggggttacgccccggccggcgagatggaagaacacggcgtttacgagatcatcgagaagcccgagcagatcgaagaagccgtaaaccgttatttccaaacgcactgaaacacaacggcgaggacttcttcatgatgggatgcgatgaagcctgcgccgcggccttcgacctggttttcatcggtttgccgttgctgtcgctgtatgagattcccatgctgatatggttcatttggcgagcattccactggaaacgaaatgacaaggattggctgaaaggcacggcgattcttgcaattgcggtggtcgctccggtgctcctttggctgtcggccttttggctgtcggcctggtatgcgtggactagttgatacaggcgactgaatcctcgtcaaggataactaatctgacataacgtacattatcggattccagtgtcatcgtcgttcttacgtacagaggcaccaatacgccgatccattgcagtctccgaagcgttgcgcgcctggaaatacatggcgacgttctccagcaacaccagaacgaatacgatgacagctgcgggcaactgcgctgcgtcgcagaaatctctcagacgcacatccatggaatccgcgagaaaaacgaagataggaaacggtatcagcgccattacaaacgacagaaaatgcattttgaccatggaccagtcaaccggctcagtcgccggacgctttgcccgcggcgtgaatatgtggcctcgacctatcgtgaacgtgataatggcgacggccataatgacggcgacgagccagagcacgattggcaggaacccaatgactatacccattgcatcaatccttcagcactgtgttctgcaagattactcgatcattgcacgcccataatgaaaaaacgacctgccggaaacccggcaagtcgccatcatacaaacctgctgcgaaatcaagcggcctcacgctgtagacgctgcgcctcaagcttcttacgcatacgcatggcggtcaattcgtcaatcgggcgattcatggaaaccgtcatcggcttgtcatcaagatcgacgtaatcctcatcctccagagcggtttcaatctgatgccacagtgagccgactgacacggcgaacacggccttgccgctttgcagcagctcaagcatctgttcgctggtcgtgcattcgtgcacgttctggccgtcgcacatgatggtcacgttggctagctgattggtggtgcgctgggtaagaaagccgatggccgcagtcacgttctgcagattcacgccggcatccaacagcttcttggagacggccagaatcaccacgtccttgaaggaatacaaacgacgggagccggatccgtgcgatggcgtgatggacggttcgacaatctgcttgcgtgcccagtaatcgagctgacgatatgtgatgcccgcaaccttggatgccacggtaccgcgatatccgcgctcgatttcctcggaatcggcgttggcgaacaactccccctggatagcgccatcattgagatcttcacgctcatcaagcggaatatgaagatgcagctcggtccggctcatctcggctcccctaactcacactggtgtaatcacacgattgcaattcttcaccaagtgtaaccccacacaatgtgtcggttattgggagacaaaggcagatttcgtgaagaacaccagacggaacttgccaatcatgatttcatcgccgtttttaagcaccgcctgatcaacgcgctggcggttcacataggtgccattgaggcttccggcatcgataacggaatactggccattgacccggcgaaacacggcgtgctgccgggatacggtggaatcgtccagcagaatatccgctcggggatcgcgaccaacagtgatttcatcctcatcaagcagataccgtgaaccagacaccgctcccctggtcgagataagcaacgccgtcccctcggacaggcgtgtaatggtgtccaaatcctcctgagtcagaggacggtcgccggttgcggtaacgggcaatacgttaatagcaggcaatccaatgatggtggtttcgcctgcgctaggaatcggatcagtcatagcttcctattctaccgtctttgcatacttattttgcgtagcttcacgcacttcatcaataatgacgttatcggaggcttcgacattaacattagctccatacttgacctgcagctgggcacccactcccccggcgatgtcaactgcgttggaaagctcctgcggattgccgatggccttgaccacatacggaggtttgatggccatgccatcggaaatcagcccttcgtcagcatcttgaatataggtcgatgcgacaacgcgaacctcgttgatggcaatgacttcggcgccggcattgcgcagctcctcgatgaggttgaacatgatcgaagcgtcgattctggatgtcgaaccgcggctgaccgtaaccgtaatacccttgcccttggccgggagccggccggaaatcagaccactggtttcctcgttctgcttggcgatcttacgcgcctgttcctgctcgttggcagccgacttcaacgagttcagctggctggtcagctgggttttgcgctgctcgaggttggatatctgcgtgttcgactcgttgagcagacgaaccagctcgttctcatccatcgtttcataggtggatttggtgttgttgatctgactcatgtaggcaaagcccagcaatgcgcacatcagcatgatgaagatcgacgatatcagtcgggaacgatcggaattccggttcaggttcttacgcggctttttgcgtatagcggggaacgaaccggtttccatgcggtcgttcgccttatcttgggcatgctggtcatgcattttgtccagcatgttgtttgatttagctcttcgtaccatatcagcctcggaagatgaaccggcgaatggcggacacgttggagaagatacggatgccgagcactacaatgacggcggtctgcagctgcgagccgacgccaagctgattgccgaggaacaccagcaaggttgccgtcagcacgttggccaggaacgatatgacgaatacacggtcagagaagcttcgttcaaagtacgcgcgtgcagcgcccagcagtgcgtcgatggcggccaccaccataatcggcagatagggttgcaagacgaccggaatgtccggcttgacaaacacaccgattaccacgccgataatcagacctaggacggctgccattattcgttcctctctgcgtattgggtttcgccagccactgctgcctcaagtgtaatcgaattggacttgtttacctgcggataaatacctgcttgtttgaaggaatcgtacaggcttgccagattctttgatcccatagcttcggccaacgtgttcttgtcaccgatggcttcaatggtgtacgggctttcgatggcattcacgccaatgagaatatgcccacccgccttacggatggaggtctgtgcaccgagcctattgccgttgatggagatggcttcggctccattttggaacatcagcgataccagctgctgcaaatcaagatccgtgacgacgcgaatcttgctggtggtacccactctggtggaggtggattggtcggactggctcgccgcaataggatcggccaatgtcatggtgatgccttcaccggtgacggccacggcaccggtgaccaattcatcctgaatcagcgtgtcgcttttgacctttccggagaccttcttcgactgctcgtcaacttgggccttgactgcattcacatctttggtgagctgttcgatttgcgcattgcggttttcgagttggtcggccaacgtctgacgcacctgtttgcgcggatcggactgcagctgctggacgaacaggcaccccgcaaacccgacaccgacgcaaatcaggaaaacgataatgcgattgaaccagatggaaaatacagatcgctgctcatggaccagtctcgaatcggagaacatgggatccatcggacggttcacgagatcgtcgatgagttgcagggaatcatcgttggttttacggcgacggcgtccgcgaacggccgtggcatcattgggagacaacgcatggtgggatttcacagaccgaaatgcacgggaaaaaatggcacgacggcgtactggctcattctcctctggtacggggaatgagaccggcgctgtggaatcaggctccatgccgctcctccaattccttgcgcaacaagctcacaccttgcttggtgtagatatatccggccaaccagtacatggcaatgccccaaatccctgcggcaagcgcggcaagatagagcaggtggaagaaggcgttggtgccaagatcagcgaaaatcaggccgacgatggaaatcatcaataatgcggtgcccgctttgcccacgaaatgcaccggcaacggaccatatccatattgggcaagccacagcacctgaattgccatccacaagtcgcgcaaacccacaatgatcagcatccaccaggggatgacgccggcgacgccgagagccaaaatcgagcagaaaatcaacaggcgatcggctaccgggtcaagaatctgcccgattttgctgacttggttgaatttgcgcgcgatgatgccatcgagtccgtcagaagcggaggagatggcgataagcgccaacgccgcaatcatctcatgccgagagatcagcgcggagatgaatggaatcgagatgattctcaacgcgctgatcagattcggcacagtgaaatacaggtcacgcgcctctggactgtatctgctgctgagtttgtggtctgtcatatcgacaaatagtctacatggtttacatacgagaggcttgcaatgcggtgacgatgatgcctcgagcaccgacttcgtacaaatcgtccatcagctggttgacatcggccttgggcaccatgacgcgcacggcgttccactgcttgtcgtgcagcggggagatagtggggctctcaaaaccgggggtcacggccacggctgcagacaccttgcttacggggatgtcgtaatccataagcacgtactggtgtgcggtcagcacgccttgcagacggcgggtgagtacggcgagacgggagtccttctcgtccagacgcggagagcgaatcaggcatgcttcggagtgcatcagcgggtcggaaaaaacgcgcagaccggcgttgcgcagcgtggtaccggtggagaccacgtcggcgataaggtcggccacgcccagctgcacggaagactccacggcgccgtccaggtggatggtttcagcttcgataccgtgttcgacgaggtagtcatgcaccagcttgtcgaaggtggtggccacgcgcttgccctgaatgtcttccagagtggtgatcggggattcgttcggagccgcgaagcggaatgtggaggagccaaagccgagcggcatgtgctcgagtgcggcggtgccggaattcttcagcagatcctgtccggtgatgcccacgtcaatggcaccgcgacccacgtacaccgcgatatccaacggacgcaggtagaacagctcgatgccgttgtcttcgtcctggacgacgagctgacgcggattggtgcgcaaacggtagccggcctcggccagcatgttccacgcgggttctgacaacatgcccttgttgggcactgcgattctcagcatgaatgctcctctcccctgttgggagttcgatgcgctgcggttactgcgttttgtggggattaccggcggaattgccagcgaatcccttgtgcttggttcagtgttctgcggccgcggaccggcgatcacaggtgcttgtagacgtcctcgagggtcaggccgtgcttgatcatcatgacctgaacatggtagagcagctggctcatctcttcggcggtgcgatccgcgccctcgtactcggcggccatccaggtttcgccggcctcttcgatgatcttcttgccgatgaagtgggtgcccttgtcgagctcatcgacagtcagggagccttcgggacggatcttggccttttcggacagttcggcgaacagggattcaaacgtcttcatgattatcttttcgttgttgcttctactggggtaatgggcgcgctgcggctcaggccttaaacgcggcctcggccttggcgcggatgtcatcgacggcctgggcggggttctcagcgccatatacggcggaaccggccacgagcacgtcggcgccggcttcggccacgatgtgcgcggtcttggggctcacgccaccgtcgacctgaatgcgggtcttcagtccgcgacgggtgatttcgtcgcgtagacggcgaaccttggccatctggttgtcgaggaacttctggccgccgaagccgggctccacggtcatgatgagcaccatgtcgaactcatcgaggatgtcgaaaatcggctcgaccggttcggccggacgcacggcgaagctcgccttgcagcccatttcgcgcagctggcgtgccagacgtaccggggcatgggtggcacccatgtggaaggagaccgaagcggcaccgagcttggcgtattcgggggcccaacgatccggatcctcgatcatcaggtgcacgtcgacgggaaggtcggtgacctcgcagatgcggccaacgatgggctcgccaagggtcaggttcggcacgaaatgatgatccatcacgtcgacgtgaaccaaatcggcattggagatggccttgaggtcacgttcgaggttgcagaaatcagcggacaggatgctgggtgcgattgcgatattgctcatggtttcctaccttatctgtgcaatgggacttggagccccgtgtttcgtgctgtttggacgctgttctttccagtgttacttattgcatattgccgcgctgggatttcttctggcgcagtcgttcttcttcgatgctctggcgttcgagttcgtcggcggtgaccgccgcaagttgccgggcctgtaccttggagtcagggccatgctggtagagcacgatgaacaggatgcagccgatcacgaagacgatgatggcggtccagacgttggtgcgcaaccccagaatcactgtggagtagttgatgcgcacgttttcgatccaggtgcggcccagtccgtaccacatcaggtacatggcgaactgctggccagccctaaggcggtcggcgagcttatggccaaggtagatgatgatcgcggcgccgatgaggttccagatcatctcatacaggaatgtggggtggaacagggtggttttgtagtcggggcactcagcgccggaatagcagatttcggatttgccgatggcgtccgcgtcgttgagtttcagaccccaaggcagggtggtgggccacccgtagagttcctggttgaaccagttgccgagtcggccgatagcctgggccacgggcagcgcgggggcgatggcgtcggcgaagatcgcgaacgggtaatgcttgtggcggcaccataggaacgccaccagcgtgcccacggagataccgccgaagatggccatgccgccttcccacaccttgaggatgttgatcaggttgccggtgggcgggaagtagtcggccggcgtggtgatgcagtggtagaggcgtgcgcccaccagagcgcagggcacggtgacgagcgtggtgtcgagaatctggtcgaaggtgccgccgtagcgcttccagcgcgtggtgaggatccacacagccacgcagatgccaatcaggatgcagattgcatacatgtgaatggtaaacgggccgacctggaatttagagaaggtcggcgaggggatataggccagattcatcgtgcctcacttactcgtattcgctaatgccgcctgccatactaccgcatggaagccgggactcgaggaacgcctcacgctttggcagcgtactcgtttcatatgtgtcgagcctcagggtccaatcttttcctcgatggcttcgatggcggataatccctttaccaggacgcatgcggcaatccatgacggaagcaggtgccgaatacgccctgattctaggggcggcaggtcttaacgtgcgttgtggatgccttcggccagttcctcgctcttggcggcgagcagcttcaagccttccttcggatcgcgtgcggtcttgttgtcgtccgcgagcagggtgtgcacgagcgcggagccgacgatgacgccgtccgcgtaggagccgaccttggcgccctgttcggcggtggacacgccgatgcccacgcacacgttctcggcaccggcctgacgggtatgttccacgaggagttcgggcgaggcgtcgatggtggcgcgttcgccggtgacgcccatgcgggcggccgcatacacgaagccgcgcgcgttgcgggccacggtttcgaggcgctcggtggacgagtccggggagaccaggaagatgcggtcgagtccatggcggtcggaggcttcgatccactcccccgcctcgtccgggataaggtccggggtgatgagaccggcgccgccgacgttctcgaagtcgcgggcgaagcgctcgacgccgtagtggtacacgaggttccagtagctcatgatgagcggcacgccgccggcgttggccacggtttcgacggcctcgaacacgcgcttgatggtctcgccgttgttcagggcgatggaggcggcagcctggatgaccgggccgtccatgaccgggtcggagtacggcaggccgatttccacggcgtcgacgccgtgctcgaccatcgttttgaaggcgtcaagcgagacgtctgggttggggaagccatagggcaggtagccgatgaaggcgggcttgttctcggccttgaacttggtgaacatagcgcccgacttgctgggcttgtggctgatgcccagcggctggccggacggcgtggttgcttcgttggtcataatcaacaatctcctcttcttgtcaggcgacggtgtcgccgtgggtgccggccacatcgagcgcggcggcctgatcgtcggtcaggtagccaaaccacttgccggcggtggccatgtccttgtcgcctcggccggagatgttcacgatcatcacggccttgttatagcccttggccttcagatccgcggcggccttgtacgcgccggccacggcgtgcgagctttcgatggcggggatgatgccctcgctctggcttaggtcgcggaaggcgttcatggcctcctcatcggtggcccagctgtagttcacgcggccgatgtccttgagccatgcgtgctctggccccacggaagcgtagtcaaggcctgcagagatcgaataggtatcgagcgtctggccttcgtcggtttccagcaggtagctcttggcaccctggaacatgccgagctggccggtgccgggggcgaagcggatagcgtgctggccggattcggggccgttgccgccggcttcgtagccgtagaggttcacgcggtcatcgtccaggaaggcgttcatcacgccgatggcgttggagccgccgcccacgcaagcgcaaatcgcgtccggatggtcgatgccgtaccagtcctgaagctgctgcttggcttcctcgccgatgatcttctggaagtcgcgcaccatggccgggaacgggtgcgggcctgcgacggtgccgagcaggtagtgcgtgtccttgacgttggtgacccagtcacgcagggcctcgttgatggcatccttcagaatcttgtcgccgagggtcacctcgaccacttcggcgccgagcatacgcatgcgggccacgttcagggcctggcggcgggcgtcgatctggcccatgtagatgcggcacttgaggccaagcatggcgcacacggtagcggtggccacgccgtgctggccggcaccggtttcggcgatcacgcgtgtcttgcccatgcgcttgacgagcaaggcctgtccgagcgcgttgttgatcttatgcgcaccggtgtggttcaaatcctcgcgcttcaagaagatacgggcgtcgaggccggtcttttccttgacgagtgcggcgaagcgcggggcttcggtcagcgggctcgggcggcccacgtaacgctgctggagcgtcatgaattccttgtggaattcggggtcggccttggcttgcgtgtagacacgctcaagctcgtcgagggcggtgatgagggcctcgggcacatagcggccgccgaactgaccccaatacggtccctgatgttcgctcaacggggtggtttcggatgctttcacttgtgctcctgcctttactagtcgttccactgcaagttcatgatcgtcggcggtggccacgccctcgccgaccagtaccgcgtccgctcccgcgcgggcgtagtcttcgacctcgaccgcgccgaatacgccggattccgccaccttgatgacgtcatcgggcagatcggccgcgagttcgttgtatttgttcacgtccaccttgaggttcttcaggttgcgcgcgttgatgccgatcaccttggcgccggcctggcatgcgcgttcgatctcctcgcgggtgtgcgtttcgaccagcacggtcatgctcaactcgtgcgccaaatccagcaggtgtttgagctgggcgtcgtccaatgcggcgacgatgagcagcaccaaatcggcaccgtgggcgcgggcttcgtagatctggtagtcggtaacgatgaagtccttgcgcagcaccggaatatgcacggcggcgcgaaccttgtcgaaatcatcgaggctaccgaggaatctgcggccttcggtgagcacggaaatggcgcttgcaccgcccctctcgtattcgcgggccagcgcggccgggtccgggatgtcggagaggtggcccttggacggggacgcgcgcttgatttcggcgatcaccgggatgccatcggcgcgcttgagccatcgtgtcgcatcgattggagccggggccgccagcgcggccttcttcacatcctcaagagacacggtgagctcgcgggtttgctggtcctccagtgcgcccgccaccaattcgtccaaaaccgacatggtcctccctttgttggtatgcgatcatgcgccactctaggtcacgccctgcccttattgccttgtgcgtcctacattctgggctattcctcgttggttcgtatcgctacggaaccagagcggccaacaaaaggaagatcgccatgaatatcggtcatacgacctgggattgattccattgatggcatagactgggcgcatgtgcaggagattcgcgctcggtttggattgggatgccgtggcctcacagttcgcggtagacgaggatgacgtgcgcgttgacactctgccacagccttcctacaacatcgcacccacgcagaacattggcgtggtggcacagggcaaggatggccgccgtcatctgaccggtgcctattggtcgctggtgccgcgatggagcgccagcaaagtgctgagctaccccacatataatgcgcgtgtggagtctgcgcatgtcaagccggcgttcgccgaatccacaaaatccatgcgagccatcatccccgcttccggctactacgaatggaaaggtcgtaggccgttctattttcacgcaccacatgatgaactattgtctttggctggcctgtactcatggtggaggccgtctcccgcatcgccatggcagctgaccgcaaccatcatcacctgccctgccgcggacgagttcgtcaaggtgcatgatcgcatgcccctgctggctcctcggaatatggttgcctcatggctggaccgctccgttgacggggccgcactgttagattccatgcgggaagcgggtaccatgctttcccggcgtctgcaatttcacgaagtcgcgccactgaacagcgacggcaaacgtcttattcagccattggattccatcgaacccatgcgtctgttttgagctcttgcagctggaaccggctatgcagctgtatatgaagacggatcaatcaacgccccactgatagctaacctcgtatggtcatcagtcaaaaacaggtctcttctgctcgacattggtcgactacgactacttttgcaccaatccgcgcaacaactcgatctcgtcgcgatgcgtggcgggcgtctgctccttggtttcgaggatcatcgggagcttggccatgatcgggtcgttgaccagtcgcgtgaaaaacgggatgccgagctggccctcgccgatattggcgtgacgatccttatgcgagtcgaggccgaactgcgaatcgttcacgtgaatcgccttgaccttggccaagccgatcacctcatccaactggcgcatcacaccgtcgtagtcgttcaccaagtcgtatccggcatccagcacatggcaggtgtcgaatgtgacgccgacgttcgccttgttctccacgccgttcatgatcgtggcgagctcctcgaagttgcgcccgcattccgtgcctttgccggccatggtctccagcagcaccatgacgccggtcgtacgttcgaacacctgattcagtccctcgctaatcagccggcagccggtctcggcgccttggcccacatgcgcgccgggatgaatgttgatatacacctcctggccggtctcgcggatggcggtcagcagcttgatatcctcggccagcgcctcgatggcaaatgcgcgcttggcctcatccttgccggccagattgtagacgtacggcgcatggacgaccaacggcccatagccttcggccctgagctgtgcgccgaacaccgccgcgccggccaggtcgagcgccttggaacgtttgccatacggagatcgcggaaagaacgcgaacgcggtgccgccctcctcatgggagcgtttcagcagctcgttccagccgccagccgtcgacaaatgcgatccgataagcaaacccgtcatttcacttccgcctttcgtgagccgtttcatctaccgctatcatatggtaggcagcatcgagtgcagcccgcacaaccgacatgaggcacaaccctctgaccatccgaccatctgaccgaaggagacttaagcatggcgtcagccggcaatcccaaggacgacaccggcctcgaacggaaaatggagtcgcgccacctgacgatgatctccctgggcggcgtaatcggtaccggcctgttcgtcagctccggttacacgattcatcaggccggacctttgggcgcgatcctcgcctacgcggtcggttccttgctcgtctactgtgtaatggtctcgctgggcgagctgtccgtggccatgccgtatgccggcagcttccacatgtatgcgaagcgattcatcggacccggcaccgcattcaccatcgccatcctgtattggctgaactgggcggtggcactcgcctcggagttcacggcggcagggctgttgatgcaacggtggtttcctcattcgccgtcctgggtgtggtcggccgtgttcattgcggtggtgttcgcgctcaacatcatgtccgtgcggctatatggtgaggcggagttctggttcgcgtcaatcaaagtgttcgccatcatcgcgttcattgtgatcggcctgctggcaatcttcggctctataccgattgccggccatgcttccgcgccgttgctgggcaacttcgtggccgatggctggttcccgagcggcatcgcacctattttctcgactttgctgaccgtggtgttcgcgttctccggcaccgaagtggtgggcgtggcggccggcgaaaccaaagatccatcgcgcgcgattcccaaagccgtgcacaccacggtgctgcgtctggcaattttcttcatcggctcgattctggtgatggcggccttgatcccctggcatcaggccagcgtggacacgagcccgttcgtgctggtgttccagtcgatcggtatgccgttcgccggcgacatcatgaacttcgtggtgctgacggctgtgctttccgccgcgaactccggcctgtacgtgtgctcgcgcatggtgtggtcgctggccaaggagcggctgatcccggcgcgcttcgccaagacgaatttccgcggcgtgccggtgtgggccgtactgttcagcatggcgggttcgctgctggcgctgctgtcttccgtgatcgccgcttcgaccgtgtatctggtgttggtcgccgtatccggcttggcgacgctggtggtgtggttctccgtgtgcgtgtgccatatccggtttaggcgtgaatggacgcgggacgggcacagcgccgacgaactcggctatcgcgctcccggtttcccggtgctgccgtggctggccatcgtgatgtgcatcggcgcgctggtgctcgtggtgctcgatgagacgcaacgttcgaccctgtattgcatgatcccgttcgtcgtctgctgctacgcggcttattacgcactcgaacggcagcgtaaacgcgaaaacaacgcctaactcgatttcgaggggctgatttggcgcttaccggagatctatctccgtttcaaggggctgatgcccaagtagacaaggctccacaatggcgtcatgtcgttgccacaaagccgtttatactcgcggtttggcgtttgaacagcccctcgaaagccaagtagatgtccccaccggacgaaatcagcccctcgaagccgagaaaccattgatagccgattatgttgcgcccagtgacgtgcctggttccgtgctcgaactggtacaataatcggagtttgttttttgcaaaggtgcattgttatgtacaaggtgttggtgtcgttcgcagacagctaatgcgcgttgactcgtcgcgctaagccgtggtcgccgtttggacccacggcgcttctgttgtgccatttcccacgcacttggtcgaaggctggcgatgggccctgaccaaaaggaatttcctctccgaatcatgctcggcgctatggtgacatcgcctgcgtggccagtatcaccggcgcgcagatcatgttggctgcccgtggcaccagagcggtcatgatcggactgctcggtacggcaatgggcgtgagcacgttggtcggctcgctgctagccaacaagctgatcgacatcattcccaccggtatgctgattgcggacgcgcttgtgttgttcgttgtcagccaagtgccgctgctgttcgtgcaaagctacgcggccatcctgatctgccagattctggccggcctgccgttccccgcgttgaacgctggtctgctgggctttctctacggcaagacacccgacaacatgcaggggcgggcttccgccgtattcgagaccacggtcggcatactgggcgcggcatgcccggcgatgatgggcgtggccgtggcctgttccgtagcgggattggccatatcgttggccggcccgctgcgcagcattccgactcccgaacgatggtcggaggttgccctgtaacgccagacggcggagcgccggtcttatatgaggtcgtacggcatctgatgcttgaccggccagaagatgccgaggccgatgaacaccagcagattgaatccgccgctatgccatggcagcacgatgattagcgtcgccatacgcgccacatagaacgccgcacgccgccagccttctcgcggccgggtttccactgtcatgtgcgtgaaactgccgccgaacgtgcagccgccgcgcaaccatggcaccacgccctcgaagaggatgagcgccgccaggaagaggatcgaaccggtccagtcgaacggttccatcgactgccatgagccgttggagcccgagggcaggttcgagcggacgatcatgacgaacagatgcgtcggcatcacggcgaacgcaatcagcgtcatgtcgatgatgaacgtgatcagccgcctcatgaagccaggtgtggtggtcggcgtcatatcggcgacccgcgccggaatcaggcgcagcgaaagcatggccagcgcgaatccgatcagcgcgccggtcgtgttccacaggagatcgtccacgtcgaacagacggtaggcgcacgggaacacgcccatgaggccggtcagctgcatcgtctccagaaacagcgacgtggcgaatgacagtactgcggtaaccggcagcggccaacgccagatacggcccatgatgaagcccaacggcaggaagaacacgatattaaacgcgatttgcagtacggcggtgagaccatcggtacggatgtcaccgatgaactgcaatggattgagctgtggcgtcagatggtgcgcggcgcaataggccgccgcatcggccggcatcggatacagtgtgaagcacagcaggccgagcaggtacagcaccgtgccatacgccactatggccgacgacagtcggatgcgattgtcgcgatgatatagcaacgccagcaccggcaccgtcagcagcatggacacaaacggccacaatgccagcgcgaacgcaaacggttcggaaaagttcttgagaaatcccatcttcaatgctccctgcttcggtccgctccattcggtttcggaccatatctctcgacttctgattccaaggtacggaacatgacggcacgcgggtatcggccacgagagcgaaatcattggaatgaaaggcgattcgtatcattcgcatggatgaggaagatgcaccagttaccattgacgccgacgaggatggcgtggtcgacgccgtgaccgcgcagatgagcgagcatacgtcgttcatcgtgttggaccagattatttccgccaccgctatgctgtttacggcccagcgcatcgccgccgaagcccatcgccgcggcatccgctttttggttgatggcgcgcaagctcccgcccaactggccgatccggtcggcggactgcagcccgattggtgggtcggcaattttcataagttcccgtgtgcgccgcgtggcacggcattgctggtgattccgcccgaaggcggtcaggatggtcaggatttgtggccgctgatcgactcgtggggtttcgccgacccgttcccggagcgattcgacgagcaaggcacccaggatttatgcggtccgatcgccgcgcccgagtccttgcgcgatatcgagcgcctgtggggctgggatgtcgtgcgccggtacatgtccgatcttgccgattacgcggagcgtcgggtatccgaggcggccagcgaggtcggcggcgaggactgctcgtcgccggtgcgcattccctcccccgccatgcgcctggtgaagctgccccacggaaaccgcacgccgcaggaactggacgccctatgcccggtattccgtgaccgaatcctcaacgaactgcacgccgaagtcgcggtcacccagtttgacggcgaactgtacctgcgcctcaccgcccacgcctacgtcaccgccgacgccatagaccgcttcgccgaacaatctatcccgaccatcgtcggatggctgcgtgggtaagcgaatcgtatgttgcattggtgccttaactatggatgattaaggcgccaatgcaacattattagagttttgcgggttgtagagctgcttacaggaaatttgcggtcgaacggcagccccaatcttccgtcacagtggcttgacgaaatcttcgccattgaagtcgccggcgatggtatccgtggattatccgcgcctatctgctgagcaaaaccgcggcgcagggcgtggaactgacgccgttcacggcgctacgcggaaatccgcacgattattggttcctcgacggcgactttatcgaccgaggcgaaatcgattaaaaccgattgataatcggccatttacacgcaagaggcgccgtcaatcgcctcgcgcatagaggccatcgctctccgtgcaggtggcgatgcgtgtgtagtattccgtcttgtcctcatggtcgatacgtgcgccgcaatgctgctgcaccgcaagacttgccggattggttttgtggacactcaggtaagcctccttgatgccgagctcgcgggccttggcaagcgtgagcttgagcccggcggttgcgtagccgtgaccgcggtattcgcgggcgacaccgtagccgatgtggcccggaccgttgcgcaggaagtcggtgagccggtgacgcaggttgaagatgcccacatagtcgccctcatcgttgacgagaatgtatttggtggctggcacccagccgtccggcaagccgacgccaagcgactcatcacgcaaccctcgcacatatgcggcgaaccgttcacgattcatgccggccgctgggttctcgaatcccgtctcctccgccgggaatttcgcgaacaagtcaaacgcgcgttcctggtccgccagccatgtctcaatcagccgcattggtcacactcctcctgttgacacagcagaccacactactactgtgctcggccaacggccgcaagccttatctagggtgtgtttacagataggcagcaagtgtctgccaatgcgtttatcgcaggatataccaggttactttccccgatacacggcagcgacgccgaagacaaattgtatgatgaacaatcccagcaggaagatcagagctcctggccggtacatgcggtagaagtcgaccatatccggctgcgccaaaggcgctgccatgatatacaccagcgcagcgaacacggcgccgagcgcggaaacaaccaagaacgcgcctacggcaaaacgcagcaggccacgatccgaggtcctccggcgcaggccacggcatcccacgaagacgaataccgagatcagcaggtagaacagcagcccgtacgtgggcagcatgtcgataatcagcagatcgttcatggcatatcctttcgtggcgcaatcccattcaacctgcgcatggccgcaagcgcaacatcgtgtcaagtaatcgcatgatagcaggttttgtccggctgcgaccgtggccacgatgagcggcatgggacatgatgacatgaccggggctgcggcgcggtcgatccgtatcgcccgtattggacaatgatccgttcgccctggatgcgatgtgcgcgatgatctcggccgtatccaaggacttccatgtcatgcgggggcacgggttcgcccgcagtggcgatcgagcactgccataacccgcataccaggccggacgtgccggtgtcggattctaaggaatctgttggtgtcgctgcagctcattgccattcccactgaagagatgattggcgaaaacgatactcactacctattcattaggcttcagctcgtgttcgagcacaagtttcatcttgctgttatccatcaaccatgcgtgtaggtctcggtccaggatcatcgccagagcgaagcacgcctgcgtcgcattctccaatgcaatccgtcgattctcacccggcagaggtatgccgttgacaagcggctcatggtgagcgacccgattacgcagggcatgcactgtttttacgatatccagcgcgtactttctcgtccagcgttcttccactgcacgggcatactggcgcccattggagaatgtcttatcgagtcctttgcgccataaatcgttctcataatctgcacggcgctggtctggccacttcgtgtggattgttccgccgtcttccaagagattgcgccaaaatccgaatgtcaatgacgctatgagatggccatgcgtatgattttttcgctggtgcggggtgagatggttccacgcttcacgaatctggtactgggttcggtcatcgaattgtagccctgccatataccagtcttcagtgccattctgctccagagcgaggagggagagttgccggtccatgcggttgcgcagagcgacctcgaggatggcgatgtcgcccatacaggcgctggccatgtcgtgatcccacaggtacagctctagcgctgggcatgaacgtctttgagcctcataattgtaggtggcaagccgttcatcggtaatgcacgcgcgcagcgccttctcccgcggacttcctttccttggagtccgtgagaggaaatcagttgttgaatttgactgtcggctcatggctcattatgatatatcaagaattcccccaaagggcctctccggacggtcttcgactcagccgtgatgcactgggggtttctttttatctggataatcggggcttggttggtctgggctcttcttcaggacaatcgcatatgtttcgggagtgctcagctttcagacgaggcattcgaagaaatgccattccgaggaatcggcatcatggatgatgatcagcgtgccgccctcgttggttatctccttatgaggccggtcgtagagcgcatcgagctgtgttcccaggttcaatcgcagggtcgcatccgcttccttgattatgcggatgttctcctggggcagttggccactggagtaatccctgccgtccagaatggtgccgtcgacttgttctgggtcagcggcgaccttcacgtaccggtatccgtccccatgaaagctttcctcgtccttgctgacgattgcccgcgcatcctcggaaaatgagatcgagaacgtctgcgacagattcgaaaccggactatagccctagtatcgagtccatccgaaccatactcccgccactaccaacgccgcgatgcccaaagcgatgatcgttccgtcccggccaccggcggaaggttcacctttccatacgcggtttcccatcgtcggcctcctagccttagccgtagggtctgctagatcaaagtgtgtattactgattagcgtgaggtcgccgccactacgtgagcggtcgaaaacctcatgccacccggcaaatccgagaagcggtcggagaactattcgaagccgtcagctaatccagtgttgaacgtacgcgacgacacccagaaacgctcctatacccgctccgaggaagacgaatccccatcccaaccagtcagcaaatcgattgaccggggatttcgcaaagccctccatcaccgaattcgttccagtcgagccctcccctgattcatggttgtcctcctcggcatccctacataaaacccgttagtccaattcaatccgttcgcgcccgcaagcgcaacatcgtgtcaagtaatcgcatgatagcaggttttgtccggctgcgaccgtggccacgatgagcggcatgggacacgataacatgaccggggctgcggcgcggtcgatccgtatcgcccgtattggacaatgatccgttcgccctggatgcgatgtgcgcgatgatctcggccgtttccaaggacttttatgtcatgcgggggcacaggttcgcccgcagtggcgatcgagcattgccataacccgcataccaggccggatgcgctggtgttggatatggcgttggggaaaaaaacacgggcgctgacgtgtgccggcgcatccgtcgcaggagcggcgggacgggcagcgtgttcacgtacgtgcaccgcgtggccgacaagctgggagtcgccagccgcaaggaggtgctggacgcatgcgccagatacgatctgctctgccccggctttccgaccggcttggcctgcggcatgccgggcatccggtgatcgcggcgtcctgcgccgtattgtccgtggcggtgctcgcggagtacgtgttctcgatggcggcacgggtccccggcaccgcgaccgtgcgcgatatcatgttggctctggctgtgcttgccggcctggtcggcggcatgttccgcccggaccggttcctgtggccggcgcttgtcacgggcgtaatcctcatgctggatgtcccgatggtcacgccgggaccgacggcatgcccgccgacgaacacgaataccagcaacagctcgacgaattgcgcgacgccgccagccgggccatgggccacacgcacgaggtcatcgactcgctcgaagaacacacaccagcgcaagccagccggacaccgaacaagcccactggcagctggaggccgtcattccctttaccggcgtgttacagacaatggaatggtgatgttcgcgttccagttgtcggaatcatcggtgatgtcgaacgtcccggacatggattcgataacggttcggtatctcttgaggccgctgccgagtccgagccgtaccgcttcgtcctttagtacgtcgcttgccgaaatgatgacgtgccgccggtcgaaggagatcgtgacggcgtaccattcgtgcggggcggcgtgcttggcgatgttcgcgtacagttcgttgagcagtccttcgagaaggtcgaggatgtcgtccgccagtggatggtcgaacgtcccgaggatgtcgtcaccttggaatccgaggccgccaaggcgacgtcgttgcgattgaatgatgccgtcaagccgttcacgctgctgttcgattttcctgtcggttttgtcgtcgttatttgttttgacgatgcggctgcgatcgtctggtttgtcggtgcgttcaagttgtcgtatcacctggtgggtgtggtcgagcgccgtttcggcgatggcgcgcagatcggtgagttggcgctgatattgctcccgatcggcggggcaatcactgcggcttgcctggtcgatgcgcaggatcatgtaggcgaggtcgttgctgatggtgtcgtgcaggtgacgcgccgtgtgttcgcggtcgagtcgttgcctgagtgtcgcggtcgcctgccgttgggcgaacagcaggttgagactgaaccccagcgacaatgggcataggcacatgatgatcatgcctacgatgttcgacgaggtgaggttgttctgcatgttgttcgcggcgagggcggcgagggccgccagtgcggaagcggctccaaggcggggtttgacgaacgagaggaccgctatggaggtcagtgcggcgatcatgatggtcgtcaacggcgagaacagccacagcaacgcgtatcctgagaccgcgaacagcagacaggcggcccataccggtgccgctccgagcatggcgcacaggacggcgacgagcagcgatatgcgtatggtcgaccatgacagcaggttctgggatgagtacacgcccatctctacggggatcgccactgcgaggaccagccccgcggccagtatggctgggtggtgtatacggttcagagcagatcgtatcgggcgcatatggcgagggcctccttgcggtcggcggcatggagcttgcggcatgccctgttgacgtaggtgaagacgctgcccttgctgacattcaggagcgcggctatctcgtcggtggatgatccatgcgcgtagaggcgcagtacgtcccgttccctggaggacagcgatggcttgtcgttttccggcagccggccctcggtcgcgtgtccttcgttgagtttgcgattggcttcccgtgcggtggggaatccggtgccggggacgggctcgccctgtgccgcgcatcgtatggcctgcgggagctctttgacgatgtcatctttggctatcaggcattgtgcgcccgcctcgaccgcgtcttgccgatatggatcaaggtcataggaggtgacgcacaccaagccgatcgtcggagtgcgccgacggattctggcgcatatgtccgcgccggtgatgcctcccaaggccatgtcgacgaccagcacgtcgggtcgcgcgccgtgggtcatgcagcgctgcaatgccatcgccggggacgtggtgctccagatgatgtggaaccgcggggagagacggctcgtcatcacggctatggcgttgagggcgagcgaatcgttgtccagcaccccgatggagatggtatgcgagtccgataggtctgtcatgccacccatcgtatgcgcatcccatgctcctcgacgtatcgttgtcatgcgcgcgcatgacagtcttttgctcccggatcgccgtctgtgggctaatggttggcgacagttgtgcaatcgtccgaaggagcatgatgatgaaattgggaacacgacgcagggccgccattctgaccgcagtgatgctgctgtccggttgcgggacgactccgaacggcggcacctcgggaagtggcggcatgctgacctggcagcaggcgaacgaggaatacaaggcgaccgtcgaggatttcccctttgaactgatgaacggcgatgcgtttccagcgaatatacccaaggcgcaggccgcgtcctcgctgtatgccaagggaagtggggaaggacaggcgtatgtctactggcagtgctcggtggaacgcgacattctcgacaacagccagaccaacgcggaagcagcccgaggcgccctccagcagctgcgcaagctgctggataccgactggttcaagaactactacgaggacaaggatggcatatacgagaacgatgtgatcggcaaatccgaactcggcgactattcgaccatgcgggacttctacaccacggactgcacatggtaccggcatgagaacggactgacgaaatgaatgcgatcgcaccgttcaaatgcctgttggcgtgcgtgacggccacgacgatgtgcgcgatgatgacggcttgctcgccgtcgcggacgccatcgtccgacgcctcctccacggcgaagcggccagcatccacggtcgaggtgcgtaggggcggcatcacgccgttgtcctcttcctccaccggcgtgcaggtggctcctgtgttctcgcttacgactccggcgaaaggctggttccactccacgactgatcaaggagcatacgtgcatgcgggcgacgtgttgggtaccgtcggcgatcagcaggtcacggctccggtcgacggcgtgatcgaaacggtcgcgcaggacaacgacatggccgcggactatccgctgttctcgatacggtatggcggcatgagcgccagcgtggacgcgaccgcgctgctggcgaccatagacccggaccagccgttgacgggccgattccagatcaccgacgcgcaggggcccacggactgtgccgcggtagtgaatgacggcgtcgccactccgccctcatcagcggaagatacggccggatcggcgacgactgcgcatgggacggaatcgactcgcacactgcaatgcctgttcccaaaggacgtgcaggcgcgtcccgggcagaacgccaccgtggtactgaccgcgacggcggtcgaggacgccttgatcctgcctgtcaccgcagtcgccggcaggctcgcctccggccaggtcagcaggcgtgacggagattcgttcgccaccgtgaacgtgaagttgggggcatcggacggcacgtcgatcatcatcctcgacggtctcgaggaaggtgacatggtgtccgcgacagctccgaatctcacaccgggagcgcaatcatgagcacactcatccggttggaacatctgagcgccgaagtccggctgcccgacggcgaacgcctgacgacggtggacgatgtcagcgcatcgttcgagaggggaacgtccaccgccatcatcgggaaatcaggatccggcaaaaccagtctcgcctccatcgtcgggctgctcaacaacgactatgacggaacgctctcctatgacgggcgggactgcgccgcgtggaacgacgccgaccgggcgcgcttccgctgccggcatgtcggcttcgtgttccagaactactccctcataccgcatctgagcgcatgggagaacgtggcactcccattgcaataccggggaggcatccccctgcgggtcatcagaagacgagcctcgcgcatgctgcacaccgtcgggctcgggagccggacggtgtgcagcatgccgtcgcgcctgtcgggaggcgaacagcagcgcgtggccatcgcccgagcgctggtgggcgatcccgatctgctgatctgcgacgagccaaccggcgcgctcgacaccgaaaccggcgacatggtcgccgacatactgttccgacatgttcgtgaactcggggtcacactcatcctcgtcacgcacgacccgcagctcgccgcccgatgcgaacgccgactgacgatcgacagggggcgactgtcgtgatccgcatgatcgccaaggatctgcgcatcaacccgttgcgtaccagcctcaccgccctgtcgatgttcatcggcatcatcgccctcatcgccggcgttctcgtcggcacgctcggacgcgactatctggaagcggtcaacgcgcgactgggaggcaagtcacccacctatagcgccatcgtcgacgtgccatcatcggtgaacatacaagtcgtcacggctttgcaggaacgcctcgcgcatttccgtccgggaatcgcatcggcgcaatatcacctcaacgacctcgccatatgggcgtcgtccggtgacggcaacacggagatacgccgcgtcaccatcatcatcaccgacgccgaacggacaagaatcatgcccgcccccatcatcgagggcacatggctgaccggagcggacgaacccgccacgctggaaaccgcagtcaacgaaagcgcccgccaatacgtgcatgatggcaccgtggcactcgcccggacaggaaatccgcaacaggtgccggcacgggtgaacggtgtcatcgccgacgggacggacacacccaccatctacgtcaacgcgaccacactgcaacgctactggccgcaagcctgggaaccggatgggctgaccatcctcgtccatcccaatgaaggcgtggacgatcaacacgccaaaaccgtgttggacgatctgttgtccgacgtcgggaccggcagcatatcgtcatggaaccgttccgacaacgccgatgattacgagcaggtcatcggttttctccaactcggcgtcaccgtcaccgcgatattactgttgtcggtatccgccatcggcatgatcaacatcggattggccggcatcgagcaacgctcgcacgagctgctcatccgccgcgcactgggcgcgaccagagccagcatagccatacaggtcatcggctcgtcagtgctgctcagcctcatcatcgccttcgccgcggtgctcatctccgcggtgctggtctgggcatttccgtggatgatgcccgccgactcgccgctggaaccgcccgcatacccatatacggcggcgatgattgcggcctgtgcgcccatcgtcacctcgcttgtcggctctcttgccccggccatcaaagccatacggctgcaacccgcgctggcgttgcgatgaaccagaagccattctggacaagcccgccgacagctggatggtcggcattccgatcatcgattgcatccggtaaacaatccgcttgcgggatgtgtaccatggtcgagatgccgcaaccgcagaatgttgactattagcatacaaatacatactattgtcttacgtaatgatgttggaggttaatgtgagcatggcatccgtcacagtccgcgtggatgcggacaccaagcagaaagccgcaaacatagccgaggatctcggtctggacttgtcttcggtcacccgcgccttctacaagcagattgtccgggagaggcgcattcctctaaacctttcctatacgaccgtgccgcctgaaaccatggaggcccttgacgaggcgaaaaacaggctcgccgacggcaaacctcgtttcaacagtgccgatgagatgttcgattcgttgggaatctgatcaatgctcaaaccggattacacagcggcattccagcgagatatcaagaaactcaaacgcaagcacactgatttacgcccgctgaaagaagtcattcgtctggttcttgaggacacggcggactccaaggaagtattgaggcgtaggcatcgcgcccacacacttaccggtgatttaaacggcgtactggaatgccacatcggcaatgccggcgaccggctgcttctatggattcgcgatgatggtaccgccatgttcatgcgaaccggcagccatgacgaactgttgggcagatagcgggtttacagcctgctttgaaccagccgatggcgatttgagtgcggcagccggccgtgcccgcagaagtcggcatcgccgcgcagcgtgccggtctgcaatcgctgatcgacgaggaggagtccagactcgaagccccaggattcaccggcgacaacctgcttgccgaaccatgccggccgctcacgccggagaccatgcgactgctgtcgggcctgctggcggaactgtacgcgaacatcgccaaacacacagatccgggcgaattggtgcgccatctgcgtcaccttcgacacggacgccattcatatctccgccagcgacaccaccacacccgccgacatgggactcggcctgggcagcggcctcgaccgctaccggaccatcatcgaaacacgcggcggcaccttccaaacccgcgccggacaagcccactggcagctggatgtcagcattcctgccaagaactagccaggcttgggactcggtaatgcacgcgcgcaacgatttcttctgtgagtttctgttcttctacacaacttaatccgatatgccttccgggcgtgtcgttgctcgtgtcgtgaaccgtcggtttgtttctagctacatacatcaatgaacgtttgtttacgatgtgctgtggaaggagccgcatacgcaggatgacatgacctcgcccggtggggcggcgacgcgtgacggggatctgctcgcgcgggtcgcctccggggacgagcgtgccttcgagaccctgtatgggcggtacgctgcggcggtgcgggcgttcgtgcgcgtgcgcgtgccggatgccggcacggccgaggaggtgtgcgccgacgtgtggttgggttgctggcggtcggcgagggcgttccgcggtgacgcgaaggtgctgtcctggttgctgggcatcgcgaaacggcagatctacatgcgcgtgcgacgcgtacgcccgaatgtgaccgcgttggacgatgcgcccgaaccgcgtgacgatggcccgagtccggagacggccgtgctgtccgaagcgggcgtggatgatctgacggcgttgctgcgccggctgcccgtcgaactggtggagacggccacgttggcgtggctgcacggcctgtcgtaccggcagatcgccgatttgtcggacgtgccggagggcacggtcaaatcccgtatctcgcgtgcgcgccgtctgctgcgcgcgcaactcgaccgccaaaacgatgcggatggaaaggaacggtgaatcccgatgaccgatcatatcgacgaaacgaccgaccgcttgacgggcgggacgcccgacgggcgtctgcttgcggcattggacgccgtggaacgatcccgttcggaagacgcgcctcccgctgcggcggtgatggcgcgcatccgcgcgtcgcgttccccgttggacggaccggcatggtcgtgggcgcgcagtctgcggttgttcatgctgctgctgggccggcagtcgcgggtggtgccgtggcaggtggtgccggccacactggcgttgatggcgttcgccggattgggggcgcggttcttcgcggtcggctggagtgcgacgatcgtgtcccatgcgttctgctcgatggtgctggccggcgtgctgctgagcgtgacgatggcgttcggggattcccgcgcggacatgatctcgtcggccaccccgttgggtacgggggcggtcacgctggtccggctggtgttcatactcgcctgcgacgtcgtgttcggcctgatggtgaccaccgtgatgggcgcgcaggggtatgggacgttcggcgtactgctggtcggatggctgtcgcccctgctgctggtcgccggcgtgggcgcgatgctcgcgatccgtttctcctcgggcgtcggcttcggcgtcggcctgctgttgattatcgcaatccggctgaatccgttcgggttcgcgggtctggcggacgcaagccggtccggtgcagcacaatcctccggacagctaggtctggccgtcgcggggctgatggcctgtgtgggggcggtggcgctggccggacgattgtccggggcgcgcatggcggccgcgaccgtctgaccgactcgaagccgataactcatctggtcgttcggcatgtcgcgtgaacttcaggacaggcggccgctacctacttggtgacgaacaaaaagaatgaccgtcaacttcatcggacttcaaggagggtcggcatgacgggaatgattcgcgctcaggcaaggcgcatcggcatgggattgctggcaatgcccgtggcctgtgggattgcggtggcggcagccggcgtcatggtatccggcgtgtggtcgcgtacgcaaacattgatggtggtgaactggctcgcccagctgatggtgatcggctcgggcgtgtgcgtggcggtcgcgttgaccggcgacccgctggtcgaggcgagcgagtccacgcccgtgggttggaggcgcgtgcaggccacgcggttcgcactcgcggccgtgtcctgtcttgccggcgccgtgctcatgttcgcgccgttgcacgtactgggcctgtggccgcaggacacggggtggataagcctgatcgcgccgaccggcgcggtgctggtcgtgggggcggccgggttcgcggccgccgcgtggtccgcgtccacgcgggccacggtcatggcggtggtcgcggtatggatgttcctcgccctcctgtgggatccgtacgtgctcgacccggtcgcgcaacgcggcatcccgctcaccgtcgccgtgatcgccgtcgggatcgcgtggcatctgctgggcgacgaggaacgcaacgtgacgcttgcgaggaggagcatatgaacatgcacatcggcttcccgcgattgatccgcgtccacatgatcatcgtgtggcggcaacgctccctatgggccgcggccgtcccattggccctgttcgcgcttctgctgggcgtgatctcccctgccggctcgcacgaccacggcgcgggcgatctggcattcatggccaagacgatggccatgttcatgccgatcgcctacatggccgcgttcaccgacttccacacacgccacgaccgactcggcatcggccaactggaggactccacacccacacccgcgcccctgctgacagcggcacgcacgctcggcgcgttcctgatcctcatcgccccgtcgctcctgctgctggagtgcgccggcaccgtccagaccctgcacggctcgtggcgggccataccacaggcattggccgccggactcgcgatcaccgggccggccgtgctgaccgcgatgagcctgtcctcgctgctcggcgcgatcctgcccatgatcgtcgcgcgcatcaccggcgtgctcgcatggttcgcgctcgtgttctcctcgccgatgctgcccgtgccgaccatcaacggcaccatcctcaacgtgatcggcgacgccgtcggcgccggatggttcgggctcggccccgtctacccggccacgggaggcatcctcgcggtcaccggcacgcccgccaacgcggccatatccctgatcgcgcagctcgtcatcgccgtcctgctcatggcgttgggcggatggtgctcggcacgcccgcgcacaacgcgctgaacggcaccggcggaacccccaccgaaaaaacaccacacggaaagaagacgtcatgttcatctccatcaaccacctgaccaaggacttcccgaggaagccccgcgcactggacgacgtgacctgcgacctgccgcacggcatggtcggcctgatcgggccgaacggcgcaggcaaaaccacgctcatgcgcatcctcgccggcatcatccgccccacatcgggccaggtgctcatggacggccacgacctgaaggacacgaggacccgccgcgcgctcaaacgcacgctcggctacctgccgcaggacatcgaaccctacccgcagctcaccccgctcgaattcctcgactacgtgggcgtcctcaaaggcatcgacgacacccgggaacgcatgcgccaggcgcacgagctcatcgaacgggtcgggctcacagacgtggccgaccggcgcatcggcggcttctccggaggcatgcgccgccgcgtcggcatcgcccaggccctcatggcggatccccggctcatcatcgtggacgaacccaccgccggactcgaccccgaggaacgcatgcgcttccgcacgctgctcgccagcctcggcggcgaccgcaccgtgatcctgtccacccacatcctcgacgacatcgcccagacctgcccatacgtgttcgtcctgcgccaaggccgcatccgctacgacgggccgaccgaacacctcaccgaacacgccacgggccgtgtctggctcacccagccatccaacaccccgccaccggccggcatgatcgtcgccaacgccgtcaccaccgcacgcggcgtatgctaccgcgtcatcaccgacaccccgcccgccgacgcgcatcccatggaccccacattggaggacggctacatggtcctcatcgaggaacaccccgaccagcattgacggcagacgaacaagcacccccgaccaccaccgaacacgacaaaggaaaccagcatgaccaacacgacacacaccatccgaaccatcaccgccaccggcctcgccgccatcatggccctgggactgaccgcctgcatggacggcatcgaacaccccgaaaactaccctaccaacggcagcaagaaaatcaccgcgaccagcaacccacaggacatcagcgccgaccaactcggccacacatggcccctcaccgtcgaccacggcactgtcagctgcacgcacaacagcaaaggcgatcccgtcatgcgcttcaccgcgcccgacggcacccaatacgccctcaaccagaccagcgacaacaaggacctgcccgacatcaatcagctcctcgccgacggcaaatccaccggcaccctcaccagcttcgccttcaccgtctgcgacgtgaaataatcatgcgcccgctgccggcggccgtgtcgatgtcgaccaccgtgcgcataccgcgagaatcctgtgacgctgacggttcatcatcgtcttgcagtcaggaccggcgcggttccgccgccgttttctccgcaacaatcgcgtatagcaccagtgcgaccagcacgacgagccgggtccaatcggaattacggatgagcagcccgacgagaatcaggacgtcgtagaacagcgtgcgcgcccaccgccacgggtattccttacggacgcgcatcgtctccgccaatccccagatcagggcgcagacggcgatgataccgttgaaccacagcactatgggcctgccctgcggatcggtgtccggcatagcgagattgctgaagaacatcaccagagcacccgtatatacggcctcgggcgcgaccgacaatcttccgccttcaacgcgaggatctgacatgattacctccttattgggggatccgtcaacgctaacgaatcatgcgaaaaaccattatatttgaatggtatgagcggggctcaagcattcacaacatgctgtcaagcaatcgtatgacaagaatcatccgtttacggcatcgccgccggatgaccacaccagcagggcacccgcgagggagacgacgatgacgccgatcacggccaccgcggtgatggtctgtcgcaatatcagcgcggcgataatcacgctcatggcggggtcgatggagaacagcgtgccgaccacgcgcgccgacgtgatacgcccggacaacgtgtccatcgtgtagggaatcgcaactcccagcaccgccgaggctgcgatgacgccccactgggcagccgacacatgcggcgcgcgagtgatggataccggcgaagtggccagcgccgcaaccgtgaccgacagggcgagcccgtcgagcccggtgcccgccttgccgacccggtcggcgaagagcgtgtacaggccgaagcacacggccgagcccagcgcgaacaggtagccggccggattgaagtagccgcccggcgtaaacgagatcaagcccacacccaccagcgcgaccaccgcgcacaggccctcgcgccagtgatgcgaaccggccagggcgaccacgcagggtccgaggaattccagggtgacggccacgcccatcggaatgcggtcgatggccgagtacaggcagacgttcatcgccgccatcgcaagcccgtagaccacgatgcccagccattcgcctttcgaccggccagccagtttcgggcgggtgagtgcgagaatgacgatcgcggcgaccagcatgcgcatcgaactgaccggaattggtcccaacgcgccgaacaacgacgccgacagggacgacgacgtctggatacccaacgaccccaccatcaccatgccggccgccgccatcacacggccacgcgccgaacgcggcgcccgaagattgcccaatacccctcccctgtcacggccattcccacacaacctctgcgccaccaatgatagtgttcggcgaagactcgcgacgtgcggagtcgactctgtatggcgggatcagcggaaagcggcaggctcactcccgcaacggaatacggtgagaaagctggctgccggacgattacgatccgaaacagtgcacccgtatacggcttcggtcagacacgtttcaccgccttgaacagcagacatgcgcttatcgcggcgatggcgacgccgaccggaatcacgtaaccggcgaatttcaccccgttcaacacccatgtggttggtatgacggcgtacagcatcggcgcgtcctcgaacatgccggaactcaccgtaagtccggcgacgatgaagaaggcgacgacgttccaggcgacgagaggactgacccagagccgcagaacgaagcatgccagggaaagaacgacggcggtgaacgcaagcatcagaatggtacgcgacgaaagcgtttcgttgacgacgaacccgacggcaagcccgtacagcaaagtcaggcagacgttgatcacgacgccgagcgacagcgacttcacgctgaagcgaagcaggagccgctcgtggatgctgaaggaacggtacgagcagggcacccgcgcatgggagaagacgagaccggccgcggttacgggaagcgccatcaccatcgccgactgcaccaccgcacccgtgttcccgtaacgcaaaaagaacaacggaaacagcagcacggccatgaaggcgagcgtcgaccagcggatcaccgccacacgctcaatacgcaatagggacttcatttcctctccactccttcgcgacggaaccggctcaacagcacataggcgaccaaaagcaccacgatcgggacgacgaccatcacggggccgacggacgctcgactcgccgcttccgccggcgacatcacggtgccgttcaggttcagtccgacggtccgtagggcgttcgcgacgtagggcgtcgcatagtcgggaaggtcgcccggcaagagaatccatgcatagcaaaggatggccgagacgattccggcggttctgggatcggcggcgatctcgacgatcgagtagatcagggaggtcgcaaggctctgcagcacgacgaagcacaggacagctgccagatgcgggtgaattctggtacccgtcaggaccatgatggcgtcgaagcacagtacgccaatcaggttcacggaggtcaggatcagggcccggaacacggccctgagcgagcatggcgtccacgcggaatacacgtggcgcggcaggccaccgtagtgcgccttcgcgaccctggcatcgcatgcgaagagcagcgaaagacagatcaacggctgggtggcggtgaaatagacgcaataccctccggttatcggggttccgttcgccgcgcctgaaatccacgaacccagcagaagggacgccacggctccgaacaccgcggcgagaaaataccatacgttccagtaataggcgaccaacgcgcgaacaggagaaacggcactcacctttacctcccctgatacaggtccgcgaggtttaccccggtcagatccgtgaattgcgcggcccggccatgtcgaatcacgatgcattcatccgggactccctgaatctcatgaagcagatgcgtggagatgacgacgcagttccccctgtcccgataggcgcgaagcgtttcggacaaggaggctatgccatcgggatccaatccgttctgcggctcatcgaggaacagaaacctcggatgcggcacaagggcgagacacagctccagacgctccttcatacccgtcgaatagtccttcgccttccgtccatgcgccgcgtggttgatgcccacattgttcaacgccgtctccgggtccacgtccagaccccagaacgcggagaccacctcgacgttctccctaccagacaggtagggaaagaaactgggatggtctatcgccgcggacatctcgttgatgttcgtccctgtgtacgtgacctctccgctcacgggctttatccgtccgagtagcgtcttcatcaacgtggttttgcccgcgccgtttgccccaagcagacagatgatcctacccgtgctcaaccgcaggttaatgttgctgacgattggggaacccttgtacccgatcgagagattcgtagccgatataactggcataatccacccttcacgaaaggcgggcctgaaggcaaaggcaaggatgccttgcccccagacccgcgcgttgcaatgtccgccgctatttcacccttcagcggccgcaaacgtaacatcatgtcaggcaatcgcatgacggttgctccatgctccctcgatttgccgaaactatccatcgggcaaaggaatgaacctgcgcatcatccgcaaggacgatgcgtacgactcccatcgcacacttgccgccaccggtctctctccccccccccaaaaaaatggcgaagggcgggttccagtgatcgtcgcaacatctgatcgaccggcaggaggatcggatgggcaggtgggcgttcgtgggtgtggagtacgcgacgcgtggcgagatgtgcgcggcgcggcggcgccgctacgccgagctgctggaggcgggcatgaacttcacgcaggccgcccgcgcggtgggcgtgtccaaacgcaccggcaaggtgtggcgcaacggaaggacacgatcgaacggcaggaacgagaaaccgtcggtggaccggtatcgttccaccgtggacattccccaaaagatcagttcgaggtatctggaccaggacgagcgcatcagcatcgccgactggcggaaggccggcatgagcgtgcgcgggatcgcgcgcacgctcaatcgtcccgcgtcgaccgccagccgcgagctggcgcgcaacgcgaatcccgcgaccggcatgtacgagccgtaccggccccagcagatgagcgcggacggcccagacgacccaagcccgcgaagatccatacggtgcccggcctgctcgcatacattcgcgcaggactgcgggcgcattggagtcccgagcagatcgcggggcgcctgcgcgccgatttcccggataatgatgctatgcatgtgtgcgcggagacgatctaccaggccatctacgtccaggccaaaggcgaactgaaaaaggacgtcatcaaggccctgaggagcgggcgcgcccaacgccggccgcacgggcagacgggctcgcgcaagccccgtttccgcgaacccatggtcatgatcagcgagcggcccgccgaagtcgaggaccgggcgatacccggtcattgggaaggcgacctgatctgcggcgcggccaacaaaagcgcgatcggcacgctcgtggaacgctcgacacggttcacgatcctcctgcacctgcccgacgggcacgacgccgaacacgtccggcaggccgtcatccggaaaatgcaatacctgcccaagctcctgaggaactcgctgacctgggaccagggaagcgagcccgccctgcacaaacgcatctcgaccacgctggacatgcaggtgtatttccgcgacccgcattcaccctggcagcgcggcaccaacgagaacaccaacgggctcctgcgccaatacttccccaagggcaccgacctgagcgcataccccgaggactacctcgacgcggtcgccgaggaactcaacgaccggccccgcaaaacactcggctacaggaaaccatccgagaaaatactcgaactcatcaacacagcatgatacgatcgcaccaatccaagaccgccatcaagagcggcaaaacacacaggtgttgcaaccaccactaaaatccgccaagcccaccttgccgaatggggtgtcgaacatggaatccgtcttgggggggggcgtgcggtagtcgcattcgtaacaacaatccgcttgaatgagctgctgagcaaatagcaggtctacatgcctgctttgaaccagccgatggcgatttgagtgcgattgcgcaggcccaaagttgcgaggatacgggtcacggcacgtttgacggaggcaggttcgacggtgagttgactggcgatttcctcgttgatgagcccttcggagatgagtgcgcagatttcacgctggcgaggggtgagtgcgtcgaaagctttgcgcatttcttgctggcgctggctgctggtgggatgcggaacgcctcgttcaagcacttgtctggtgattcgtggggtgagtattgcgtcaccgttggcgatggcgtgaaccgcgtcgatgaggttgtgcttggtgacgtccttgagcaggaagccgctggctccggcgtcgagaccgccaaaggcgtaatcgtcctcgtcgtacgtggtaaggatgagaatgctgatggtgggccagcgtctggtgatgcggcgagtggcttcgatgccgtccataccgggcatccgcacatccatgaggattacattcggcaatggacgatgctgaacggcgagctgttcgagcgtctcgatggcggatcggccgtcagcggactgggcagtgacgacgatgtcggaagcatcgtcaagcatgagttggaagccaagtcgcgcgaaacgctggtcgtctacgagcattatacgaatcatgcggtgtggtccttttcgttcactccgttggacgggatggtcgcctcgacgacccattcgccgtcttcgtttggaccgtattcgaagatgccgcttgccgattcgacgcggtggaatagacggacgagcccagtaccgtcatccttgcgcgcgtccttgcgcgcgggactgccgtcattgcggataatcacggcgacggtgccgttctcgctgtggttccaggcgatgctgatatgcaccacgttctgtccgtgacgtatggcgttggtgatggcttcgcgagtcacatcgaaacacaaatcagcctgagcttcgtcatcggcgcgcgtaccagtctcggtgaacaccgtgacgatgcccagccggcgtgcgtgcgcgagaatcggccgaatgtcatcccatgaatgctggtctgattcttgggtgtgcgtatcgtcaccgttcgccgctccatcgaactcggtcagtgcgcggacggctttgcgcgtgtcgcccagactctctcgtgcgatttcgttgatgccgtgcaacgcatcctccacgcgtgggtcatcggttttgccggccagaccctcagacagtgcgatgattacggtcagatcctggcccacactgtcgtgcagttgaccggctatgcgcgaacggcgtattgcggcatcgcgttggaaggccagctcggctgcccgccggcattcctcggcagctttgtgttcggcttccttggcctgttgcctgccacgtactgcaagcgcgccgcctcccacggctgccaacgttaccactcgactcacccattcggtcgcgagaacgtccggatgcaccatgatggccgacgcggtcatcgacagcatcatgccgatgcctccaacgcacagcccgcgccccctcgctgtccgggcgaacgcatagcaggcgacgagcgtctgaatcatcacgattgagtccaaccgccagtacgaggcaactattaacaataccgcttcaagcgccaaggcaacggctggcagccagtaacggacaagcagtatcgcactgctggctatggtcatcgccagcagcagagccaatcccagcggatctttggcaaacgtatacatggtgtcggccggcgctccgatcgcatgctcccacagcatcgctgcacattcgaccacggcgatgaccagtggcacggccaggaccgtgaccttattggcctgcgcggattgcggtttcatggctcccattgtggctctttttgtatgatgttgcgtgcatgtcagcatgtgcgtatcgtgtcggccacgctgcggtgtagcgcggggcgaatctgcgtgaactggatgaggaacaatgccagccagcaggccgtgcccatgccgattacgcccggccatgggatttcggccacggggatgccgacgagcgccgcggatcttgcggcgaaaacgcttgcgctgacggcgaccgggatgagcgagagaatgaccgcgccggcggccagctgcaggctctgccagagatacatgcggatcacacgacgtggggacaggccgatgctgcgcagcaatgcctggtcggcgaccatgctgcggttcgacagggcgatgaccgccatgctggtggccagggacacgatgcacagcatcgttatgagcagcagcgagtccgcgtagttcaggctcttcggatggccgcccaaggcgagtatccggccataggatcgcgcgcaggtcagcagggtgaccgacagtcccatggcaagggcgagcggggcaatcgtgttcgtgttgctggcggccttcgcctcggcggaacgggcggcgagcacgccggtcgcggacccgcacaggcgacacacgacacgtccgatgcccaacagaatcggaatcagcatgctgacaaggatgtacatgccgaacgaggcgatgatgccggcccacagcgcgctgttgaatgtctgccccgcctcctggccgaacgcgagcgcccgtggcgtgcccatgccggagaacgccaatgccagcgccgccgccatgacaatcaaaccaagtgcccagtgcgcccaagaccgccaaccgtgccgtatcccgatggctcccgtgccgcgaatcacctcgaggggacggatcttcgctgcgcgcagcgaggggatggacgcgcccaacatgcacgtggccacacccaacagcagggatccgagccacgcggccatcgacggcgtgaacgcaggaggtgcgaacgagccgaatccatcggcgaagctttccgcagccatggcgttgaactcgggaaccgccagcaggctggccggcactgcagccagagagccgatcagggaaccgaacaggctcgccacacccacgagcatccacatgctggcaagcacctgactcgggctggcgcccataagccgccattgcgcgaacgtgctgtgaatacggttgaccgtggccgagccgaccaccgtcaacgagaagaacgcgagtaatgacaccaccacatagatcgtgaccgacaccatgccgaactcggccggatcaagacccgcctgccgcgcggccaatgtgaacgacggagacgaggtccacacgaattggttcatgcatatgcccaccagcgtggtcaccactgcgaccaccagaatcgtgggtacccatcccgtgacattgtcgcggaacacacgcagcacatacctagccacgatgagcctccttccgctgctgcggatacgccacgcgctggaccggtcggcccggttggacggattggataggctgggcgttcaccatcatcgggccgacagaccgcgccgccgcaaccaacggcggcgacccggccggtacgaaagtgcggcgtatgccatcggcaatctgctcggcggtgagtctgccagcgatgtgggtgacctgaccgtcgcgcaggaagatcacgtggtcggccaaagcggcggcatccgtgtcatgcgtgaccatgaccacgctggagcccgcatccgccagctcgcgcagcacctgcagcacaagctcgctgttcgcggtgtcgagcgcgccggtcggctcgtcggcgaacaccaccgccggacgcatgagcagcgcacggcacagggcgacgcgctgctgttcgccaccggacagggcgcttaccgtcgtcttcgccctctggcgaagaccgaaccgggacagcagctgcgtgacctgcacgtagtcggccttgcgatgggcgagcgagagcggcaacatcacgttctcctcgaccgtcagatacggcacgagattgtattgctggaacacgaaaccgatatgcccgcgaatgaaccgcgaacgccgttcctcattcagtgcgtagacgtcggtaccgccgatggtcacccgcccggaatcgggcctgtccaatccggacagcacatacagcagcgaggtcttgcctgcgccggacggaccgacgatcgccgtcaagcccgctccatcgatatccaacgaaacattattgagaacagtctgcgtgtttgcgggtcgggaggcggttcgagcatcgaaccctgtccgtttcaccagtccgagcgcctgaatcggtgtgccggcattttgccaagtcatgaggtagccccctgtcgtgaaagttgacgccgtttttctcaaccttcgcgccaggggcatggcaggtcgaggtaaacacggaaagtgacaccctagggtgacagattccagtagcgttccatgaccggcacccaatatgccctcaaccagaccagcgacaacgaggacctgcccggcatcgtccaactgcccgcctatgccaagtatgatggacggctgctcgtcatacttggttcctccgggaagcgaatatccttctgtcgtttgcggaaacaagccctgccgatgcccaagaccgccagataaagcaggaacatcacgggcacgacccatgtcacgtaccgccacgggtcaatctggaacgtatcgaagacgatgaacatgacgccccacacgttgatggcgacgatcgccagaatctgggcggccgccgaatcgaacctggattcggccgggctagtatcgttcgcgtcggccggaacgtcaggcgtccgcccggcgcgacgcatgaagccgagcgccgcccacacgatggccgccaccaacgccacggccgccggcaccaccagcttccagaactccccgtcattccagccgtaccggatgacggcgcacgtgatggccgtgacggcggccacacccaatgtggcggaagcgccgaaaaaccacagcagaccttgattccgacgcccaccatgggaggcccgcacctcatcgtccgcaaccatatcgtccccgcattccataaagtccgacgcgtacgcatgccatctcaattatggcactcaaagagtcaatcagacaacatgctgtcaagcgatcgcatgacaggaatcggctatccgtcaatgccttagggtgctgtcgatgcatatccgattgaccgatgcttctacatgcgtgccgacatgtgccggtccttcgcgtccgcgtacgcattcttacatcacgacctcaaactaatctacgaaaaactttaaacagatatctatttgattttaatattatttatggtatacttaattttattaaacccgccgtgaattgaaggaggcaggtatggatacgacgatgatcccgccgtggatgtcgaacctcgatgacgaggatatgacgttcatcaaacggtttctgctcgcatcaggctccatgaaggaggtcgccgcgcagtacggcgtctcctaccccaccgttcggcttcggctcgaccggctcatccagaaaatcaagttgggcgagcagatcgagaacgagccgtatatcgcgctcatcaaacggctcgcggtcgacgacaagctcgacttcgacaccgccaaaatcctcatcagcgaatatcgcaagcagctcaagcaaggagagtaatcatgattggcgccacaatatttgccgtagtgtttttcgtgtttctcatcgccatctgcatcggcttcatcatattgcagatcaggctttcgaagatggacagcaagtggcccggtctggtattgcccgccatcacattgctgctgtcgcttgtggcggcgattaccgtcttcgccagggcggacatcggtgcgtatggcaacatgtggaacgtcgtgctttccgcattcatcgcgttcctgtccaacaacgtatccaccatcgtgctggccggcatctacttgtatcagcgtgacaagatcaatcgtcgcgccgagctggcccgtatgaacgttcaggacctgtaactcactgtgcaaaacacgcagactgaaccctacgccgcttatgccgactcatcatcttttgcgccgcttcgcgcagcttggatgattaagccggtgacgtggtcgcagggttcgtcgcgcaatcggagccggacgccctgtcatttcggctgattccgtacatcctgttccgccgcgaaccgttcggcgatttgccgtgcgtggatgttcttggcttcgttgacgaagtcggcgcatgccttgctgccgtagagcgcctcaccacacgggtcggcgaaacgcggatcgccgaccagcgcggagcgaatggccccgaacgagccggacagcggcatggcgttcatcacggtcgcggtttgattctgtgccgcccgggtgcgggcggtcttgaccagaccggtctcgtcgcagtagcgcaacgtgcgcgtcgtcacgccgctgatcaatgccgcctgatcaatgggccacaaccggcccgtatccagcggattgccctccacatcgaacgcgccggaaccgttgacggcgttcgccgtgttgtcgttctcgttcatgatcgatcatcccccttgaagccgattatcctctacccgccgtgcgtgtttcgcggcgttgccgtcaggatagacgtttacgcaacgtcaaccgcaagcgataatgggatgtatcgttcaagccaggcaatatgccgtcaagcaatcgcatgacagcaccatgttcggcacataccagatggaagaattggcaaaccttaaaaaataccgcggttattgctgtgccgagaacgccaatatgaccatagacgtgctttcccgctacacgttattcacctgtcatgcgccgatatcaatcaaaagacacttgcataaccaccgctacgcatcgccaataacataccgatgagccagaatgaggcccaggccacgatgctaatccgtaaataatactggtcagagtggcaggtacattggtcctatggctaagcgcaaacatatcggcactgttgttattgcaatactggtcgctattctgctggcggtgggcgtttccggctggctattctggcagtcggcacaacgggtgatcggcgaggcgcagcaggcgggcgaatatgcggccgaggcgcagcaatccgtcgggcagggcgacttcaagcaggcgcttgagcagatggacagcgctggcagtcacatcgtcgcggcgcgagacgaaacccagggcatgctatggcaggccgccgaatacgtgctgtattacggttcggacgtgaaggcggtgcgcggcatgctggatgcggccgccgacgccacgaccaacgccctgcccaaaatcgacagtgccgcgcagggcacgttggtggacttcaatatcgaagagctgctgtccggcatgaacttctccgacggcacgctttccattcccaaaatcgcttccatcaagcaggacctgtccgacgccggtgcggtcttgaagcgcgtcaagacgtcgatttatgcgctgccgcaaccccgcacggaacagatcaccgaaatggtcaaccagggcaagcaggtagtggaccaaatcgatgagactttcgacaccttgaacaccatcgtcgaaaagattccgggctgacgttggttcgttcttgtcgtatattggcgtaacctccgcataaggctagtccatacaaattttatataaatttgggataggaggtgccaatatgccgacacgcacaccaatcccggtcagtcgggcgatgcgtcagatatccgccaacctcgatttggcgcgcagacaacagcgcattcccgtagccttgctggccgagcgggctggattatccatgccaacggtcaccaaaatgctgcgtacgggtaatggcagctttgagaacttcctccgcattgctcgtctgcttggactgctggacggcgtacagcaagcgacggaccctcttaacacagatatcggcaaattacgcgccgacgaagacactccgaaacgtattcgatagtacagcaggaggcgcaacacatcatggaagcaatcgtcaccctgcagttcaacggcacagacgtcaccgtcgggaaattattcaccagtatcaggcgcggcatcgaatcggcaaatttcacatacgatacggcctatatgcgctcttcaaacgcagtatccctctgtccagagatgccccctcccccggaacgttcccggccgagcataatgcgatgcatcgcatctttcaagactgcatgccggatcgttggggcaggaacctcatgcttcgtgcagaacatcaagatgctcgttcggagcatcgcacagcacgcacactatttgagggagatctcttgctatccgtcaacgatgagacccgacaaggcgcatcaacctgcgtggagagcatgtcgaccgccatcgcgcggatacgctcgtagcgctcccggtcgaaggggtccttgcagtacatcagtccggtctgggccagcgcctgcaattctcgggcctgttccagtaacgtgcggttcgtggccatcatcgttcatcctgtcatcgtaaggtcttggatccgtttgcgctcaggcatcgcagcgtagtgcaagcagtatagcacttcgaaccgttccggggacgagggtctcagcgcatcccccgtaacctctcccatgtgccatcaacgcttggcgagctgcacgttcttgcgctgtctgcgattgcggctggcgaccgacttttcacgctcgcggcgcacgtgggcctcctcacgcgcggccgccgcgcgctcttcttccaaagacggcaatccggaggcggcgcggtgccggttctcccgctcatggtcgcgttcggccttgcgctccccgcctcggatccgggcgccggaaaccatcgcagttggcagagcgtctggccgaagttccacaggttattggtcagccagtacagcagcacgccgaacggcaaggtgccgcccgacaccacgtagatggccgggaacacaaacgcggtcagcttctgcgtgcggaactgcggtgaatccatgacgtccttcggcgtattgcgatggatgagcagccactgcatcgcgaacaacatcagacacatcaacgccacggccacgccgatgacgacgtgcgactgcggcgagacgaccgtgccgaacgagtcggcgatgcgcacgccgaatatggacgatgattcgatgtcgcccgccatgacgcggtcgatgccgctcaacggttccgcattcccggcggcgcttgcgggcagggattgcagcgtgtagaacagcgagcacagaatcggcgcctgaatcagcgaagcaggcatgaaccgagcggattggcgttatgccgctgctgcaaagccataatttcacgttgcatggcttctttggaacgcggatccttacgcgcggcgacttgcgttggatacgttggatttgcggttggagcacctgcatacgctgcgtcgcgcgcatttgggagaagaagagaggcaatagacagatacggatgatgagcacaaggcacataatcgcgatgcctaagctgtgcggcaccgtctcctccttctacggcggcggcatggtcgccggccagcccatcggcaccatgatcggctctcgcatgatcaacaatgcgcaagccggcttcatcatcggcgccgtgatcatgctggcttccggattcgtagcgcttgccatctggccgcgcgaggaatcctcaaaggacatggaacgcaccaagatgacgctcaaggatctcgctgtctccttccacttcccgaagttctccacctcgcgtgacttctacaaggcgttcggctgccgagtgtgcatgttgctcagctaccagatgatctccgtgtaccaactctacatcgtcgaggattacgtgcaccagaccaagaccgaggctgccggcaccatcgccaccatgtccatcatcaccatggtcgtttccctgagcgcttcgctgatctccggcccgatctccgacaagatgcacacgcgcgcaaggtactagtcatcatcgcctcgctgctgttcgcgattggcaccgcgatgccgcggatcatgccgagcgtcacgggcatgtacctgtatgcgggcatcgccggcttcggctacggcgtgtactcagccatcgaccaagcgctcaacgtcgacgtgctgccgaacaaggaagaggccggtaaggacctcggcatcctcaacctggccaccacgctcggccaggcggtgggccccaccatcacctcgacggtaaagaccgcgaccggagctttacgcctgcattcgccatctccatcatcatggccgtgtgcgccgccgtgttcgtgctgcgcattcagaaggtgaagtagacgctgcaaagtgcccatctccgtttcgaggggctgattttgactttgcggaacatctatctccgtttcgaggggctgatgccaaagtagctactggtcaaaaacaacggaatgacgttggagtaatgccatttctatccgcgatctggcagttgaccagccccttgaaacgggagtagacctccgacaagcacgaaatcagcccctcgaaactgaatttggctcaatgcatcgcccggcgcaactatatcctcggtgcgggtatactatttcgggccgtcacgatgacgtccacggaacgcacgcatggcaaagagagaagcatgagtcagcccgataccgacatggcaaagcagtcgccgtcctcgcaacaggaaacgcggattaggatggatgccccgcagcataagccaaatcaggcagacgaatcgagcgcattaggcgagcagtcaactgagccgactggccagcacaataaacacgctctgcacacgaacctgaagcgcggcatggaatcccgccacctacaaatgatctcgttgggcggcgtgatcggcaccggtctgttcctgagctccggatataccattcagcaggcaggcccgatcggtacgattctggcgtacagcattggtgcgctcatcgtctatctggtcatgctcacgctcggcgagctctccgtggccatgccggtgaccggttccttccatgtgtatgccgaaaagttcatcggccccggcaccggtttcgtgatcgcgatccaatattggctcacttggacggtggctctcggctccgaattcaccgccgccggtctgctcatgcaacgatggtttccggacagccccacatgggtatggagcgcggcgtgcatcatcctcatctttaccttgaatgccctgtccgtccgattcttcgccgaggcggaattctggttcgcttcaattaaggtgttcgccatctgcgcgttcatcatcatcggtctactcgccatcttcggcattattcctatcgccggatatcagcatgcgccgatgttcggcaatctcgtcaaagatggcatctttcccaacggcttcgtgccggtgttcgcgacgattctgaccgtcaacttcgcgttctccggcaccgagctcattggtgtgaccgccggcgagacgcgcgacccggaaaccgccgtgccgaaagccatccacaccacgctgtggcgtctggtgctgttcttcatcggctcgatcaccgtgatgtgcgcgctgattccgtggcgccaggccggcgtgggcgaaagcccgttcgtgctcgtgttcaacagcatcggcatcccctatgcgggcgacatcatgaatttcgtggtgctcacggccgtgctttccgcctcgaattccggcctgtacgcttccacgcgcatggtgtggtcgatgggtaacgagggcatgattccacgctggtttgccaagacgaaccgttgcggtgtgccgatgctcgccttgtgcgccgcaatggccggcggcctgttggctctcctgtcttccgtgatcgccgcttcgaccgtgtatctggtgctggtggcgctgtccggcctgtccgccgtggtagtgtggattgccatcgcttactgtcagattgtgttccgccgccgttggctggcatctggccattccgctgatgaactcaaataccgcacgcctggctacccttatgtttcctgggcggcgttcatcctgtgcaccgcatcgttcatattggtgattttcgatgccgagcagcggttcgcgcttgtggctgagctcgtgttcatcgtggtctgttacggcatttacttcctgcaacaatggtggcggaaacgcagaaaagcgtctgacagagaagacgatctatccatgccgtgggccaatcaacactgattgaacgattgcattttgttccgggttccagctccggttctttgcattgcggattgcgtatatccgaacaatagatacaacacaataaaaagccatatttgattggaatgccgtccatccccattcataggtcaatagaaggccggcaaacagataataaaccgcgaggggcggtgacgttcggatgatgataaccgaacgtcaccgcccctcgcactcattgcgggatcaaagccacgaatcagttctccgcattctcgcggagagcctccttggcgtcgttcttgacctcggtggccttcttggcggcctcggctttggcgacatccgccttggctttggcctcgtcgagcgcatccccggccttgtccaccaggtcagaggccttgtcggtagccttgtctttgatatcgcgggccgtatcggcaactttgctgccggcctgtttggcaagatccttcgcatcatcgatcaaactcatagttgctccttagtacatgtatgcatggaactactgaaattgctgacaatactgttcgattattcttgagttgtggtgagccttacttgcgacgttcccgcgcaaatatccagctcacacataattatacatagcgtgagtgaatggaatccgtcaactcggcaaccgtcaaatgaatttcaacggctcatgcagactgcaatctcaatggttctctacattcccgcagcaacggattgctccttgccgtgcgccgcctcttgactttctatgagcacgcgccaatcatggaatatatggggattgcaatcaaacgcatatatgaggagccggcggcatcggacgggttccgcgtgctggtggaccgcctgtggccgcgcggcatgacaaaggagcgcgcggccctggacctgtggctgaaggccgtctccccttctccctcgctacgcaaatggttcggccatgaccccgcgaaattcgcggaattccaagcccggtacgttgccgaacttgacgccaataccgccgtcgaagacctgcgctgtatctgcgcggagcatcccgacgtgacgctgctgtatgcggccaaagacccgcaagtcaatcatgccttggtactgcgcgactatctcaatgagtcacttcaataatcggcagcacaagcaaatgttcaaaaacgacattcgcttctcgcggcgatttcgaattccaaagttcacaccaacggcttgcgtacatccagttcgcaagtgatgccagtctccttgcgagcccattccgccgcctgcaatgcggcgatgttccagagcgcgtgcggcacaccgccgagatctggatgggaaccccagaacgtgatgtcatcggagtatgcggtgatgagcgaatcctccgtaaccggcataatcgtgtggtaaagccgatcggccagcgtggacacgaattcattggccgcggcaaacgtgtcgatgagatgctgctcggcagtcaccggcgggcaaaccagctcccaggattcgacatccgtagcgctccattgcgcggcctcgccgtccacctcgcgctgcagtgaaacgaacagcctagcgaactcgtccgaggtcagacctgtaactcgacgacgggtcgagagttcaatcggagtcatcaacttctcctttccatgtatttatgcatcatatgctcttaagggtcaaattcgattcatgcggacgaacgaatccatctagtaaacgaaaagcatggctgcaatgcattacagaattgactcaagatccccagatgaatgctttttcttgtaaatcggatagactggcgcgagaacagtgcgagaaagaggcgaggatgaccgagaaacaatcgcggaagcaaacgacaacatacgccaacctgcagaacgaccagtccggtcagccacagcaaggcaagccgcgcaagccgtcgctgcatgcacgctggaaaaccatgagccaagctatgggcatggaaatccgcgagcacaagagctcgttcgcggtctatgtggtgctgcgcatgctggtgctcgccatggccatactccaattcttcaacggcaattatgagaacgtatttctgtgcatccttgcgttactgctgctgttggcaccggcatttatccaggtgcagttccgcatcgagctgccttcggtgctcgaagtcatcgtgctagtgtttgcgttctcggccgagattcttggtgagatcagctcgttttatgagatcttcccgttctgggacacagtgctgcacacgatgaacggcttcctcgccgcggcgatcggcttctcattggtcgacctgctcaaccgatccgaccgggtgaagtttgagctttcgcctctgtatctggcgattgtctccttctgcttctccatgaccatcggcgtaatctgggagttcttcgaattcggcatggaccagctattcgggtttgacatgcagaaagacgccattgtgcattccatcagctcggtgatgctcgaccccacgcacaccaatcacgcgattcatatcagcgacatcacacaggttacagtcaacggccagaatctggacctcggcggctatctcgatatcggcctgatcgacacgatggaagatctcatcgtcaacttcatcggcgcggtcgtgttctccgtgttcggcttcttgtatgtgaaaaaccgcggcaaaaaggactccatcatcagccggttcgtgccgcatcgcaagtccgccgaccgcgattatctgcgactggtgatcgatggcgggaaagcaactgacgtcggttcggctgatggggccgcagccagtgccggtagtgccagtaccatctcagctgtcactgccaagccttgagcacgctctgcggtactttcgacgcgtcaaaacggtagtgcccggtgaccgtcatgtgcttcttgaatgagaagtagtcattctcgcgctgcttctgggccatattgtgaatcacgtacggggtgccattcttgtcgcgtttgtccgagatgacgccgatatgcttgacgtgctggaagaccacgatgtcaccgccctgatagtagtcggagtcataggccgggtgattttcggcatccttacgggcaccggtaacaatatctgcatagtcgtccacaccgttgccgttgaaatcaaccgtgctggcggctttcgaatacttgcgattcgcctcatcagtcggcatgatatctgattccgatgcagccgaatccgctgaggttgggtccggtgttcccgccagcaaacccgccacctgtgttacgccagccgttaatgacatgggcagtactcgggccaggtgacgtgcagccagcacaccacctagaacaagcatcacaatcactgcaacagcaagtatccgttcgaaacgtcggcgtgtgcttcgactgttttcatgccctgcttcagtcagatgatgtgccatatcggtctcccagcgcgagacttcccaatcgcttgtttcgatggctcacaccgtagtcgcatgacttatgaaatgcttggcccatacagtttttctgtatgggcttcccatgtccgtctatctcacagctcgcgcagctgggcggcaatctggatggattcgacgctggattcggccttgttgcgggtctcctgccattcggtggcaggcacagagtcgagcacgatgccggcaccagcctgcacgctcgcctcatgatcgcacaggaacgcggtacgaatggcgatggccatatccatattgccagagaaatcgaagtagccgacggtaccgccgtagataccacgatcggccggttccagttcgtcgatgatttccaccgcgcgcggcttgggagctccggagagcgtgcctgcagggaacgcggacttgaacacgtcaaaggcggttagcgacgggtcgaccttaccggtgaccgtcgagcaaatatgcatgatgtggctgaaacgcttgatatccatgagctgtacgacttccacggactgtggcacgcacaccttgctcagatcgttgcgggacagatccacgagcatgatgtgctcgctgcgttccttcggatcggcaagcaactccttggcgaacttctcgtcctcctccggggtggcaccacgcgggcgagaaccggcaatcggaaaggtcatcgcgtggccattgtccaccttgataagggtttccgggctggagccgatgacattgaaatcacggccctgcgcgtcggtcaacgccatgaaatacatgtaggggctcgggttcagcgtacgcagcacacggtagacgtcgaacgggtcggcgggcgaatcgatgtcgagacgctgggagatgaccacctggaacacatcgccgtccacgatatgttgcttggcacgttcgacggcctgctcgtagtggcttttctccgtacggaaacgcaactcaggctgagcaaccgtttcgtccagaatattgacacgaaactcgtcaggagccggcgtggcagcgtcacgctgcatctggtcgagtcgggcgacggcttcgttgtaggcggcgtcggctcgggtcgacttgttgtccacgttgaccgcgttggcaatgagccataccgaaccggatatgtggtcgaccacggcgatatcggtggccagggcgagcacggtttccggctggccggtctcatccggggcctcggcgctcaaggtcggttcccaatgacgaatcgcatcccaaccgactgtgccgaccagaccgctggtcaggttcggcagacccgccacctgcggggctttgagggccttcagagcggcgtgagcgacctcgatcacgtcaccttcggtgggcacgccgacagggactttgcccagccagtcggcctgaccattgttggaacgcagttgagccatcgagttgacgccaatgaagctgtatcggctccacgtgccgccatattccgcggattcgaggatgaatgtgccggaacggccgccagcaagacgctcgtagaagccgaccggggtgagcgaatcggcaagcaaacgacgcacgatgggaaccacacgatagccggcatcggcaagctcgtgaaactgttcgcggctgggccaggtggcaccccacttcaggtgttcgacgctgcattcgctcatgttcgctcctttacttgcgttgatgacgtttattctactgccgatgaagccctccccccagtcagctgtgctgacagctcgtcgcaagagaggacggcctccggctgattatattttgctcactgtcgttcgccttcgcctaaaaacgcctccgcgttttcttgacggttcagcctcagagaggggagccagagaaaggaaccaactctactgctcgaccggacgatgaccttcgaccacgggcagagggcctccttcgaggaagcaactgcgcttgccggtgtggcaggcggcaccgacctgatcgacctcaaccagcagtgcatcgccgtcgcagtccaaggacacacccttgacgtactgcacatggccggaggtgtcgcccttgcgccagtattcctgacgggaacgggaccagaaggtcacgcgcccggtggtgagcgtgcggcgcagagcctcatcgttcatgtagccgaccatcagcacctcgtgggtgtcgtactgctgcacgactgcggcgaccaaacctttggcatcgcgcttgaggcgtgcggcgatgcgggggtcgagttcagtggaattgtcgtatatagtgtctgtcatatttgtcttctttatgtggaccatcctcagtcacgctacgcgtgacagctcccgccagcaggagcaataaggtgtatgcgttttatcgaacggtgtaaccgtgcttcttgagttcggccttaacatcggcgatggtcagaattccgtaatggaacacggaagccgccagcacagcatccgcaccggcctcgatggcaggagggaaatcctcgaccttgccggcaccaccggaggcgataatcggaatcttgacttccttgcgcactgcgcgaatcatttcaagatcgaagccttctttggtgccgtcggcatccatcgagttcagcagaatctcgccagcgcccaactcttcagctcgtttgacccaccagattgcgtcgataccggtggatctgcggccacccatcgtggtgacctcgaagccggactgggtatgctgttcgccctgttcacggcgggcatcaacggacagtaccagcacctggttaccgaagcggtcggccacgcggctgatcaacgacggatcgttgatggcggcggtgttcactccgaccttgtccgcgccgcagcgcagcagcgaatcgacatcttcgggcgtgcgcacgccgccgcccacggtcatcggaataaacacctgctcggcagtacgggagaccacgtcgatcatcgtattgcggtgggaactggaggcggtcacatccaggaaggtgatttcatcggcaccctgatggtagtattcggcggccaattccaccggatcgccggcatccttgaggttttcgaaatgcacaccttttaccacacgaccggcgtcaacatccaggcatgggatgactcgtaccgccaacgacatgcttcactccctgtttggctttgctttacaacttttcagactacctaccgcccgttacatgggaagcagtcatttctggaatatgagaattaccactatatgcggtcggcaaagcaggcgcatagcggcccgaaccgtgagagaatagccagtggaacaatcccaatcgcgtgaaggagaccactatggctgtggagaacagcaaggttctgattatcgtcaacaaactggggcattgaggaaactgagctgacgcgcccgctgcgtgacctcaaggctgccggagctcaggtgacgcttgccgccatcacgctggacccgtgcgagaccgtgcagcacgaccgttacgaaggcgagacgctgacgccggatgcgctgctgagcgatgtgcaggcctctgattatgacctgctggtggtgcccggcggcacttgcaatgtggatcgcattcgtgtcaatgaggatgccattacgctggcgcaggagttcgcgcatgagggcaagccgattgccgcaatctgccatggcgcttggctactggtcaatgctggactggttgccggcaagaccgcctccccttgccgttacaccgccgccgatatcaaaaacgccggcggtcattacgtcgacgagcagttgcacgtggatgatgccaacggcttcaagctcatcacgtcccgcaagcccgctgatttggactacttcgtggacgcaatcaaggatgcgctgaactaactaccgctccttggcagcgagctgaccgcaggcaccgtcgatgtcctggccgcgggtgtcacgcagagttgcggtgatgcccgcgcggtgcagaatttccaggaattgcttctcgtcttccggcttggaagccgtccactttgagccttcaatcgggttcagcggaatcggattgacgtgagcccaattatcaccgtaatggttgagccgcttggccagcagctgcgcatgctcggcctgatcgttgatgccacgcatgagtgcgtattcgatgctgacacggcgcttggaggcaagccagtaatcatgtgccgcgtccagcacctgagtggtgttgaaacgcttgttcatcggcaccagctcatcgcgcagctcgtcgctaggcgcatgcagggagaccgccaaacgcaccggaatgccttcggcagtaagcttcttgataccaggcaccacacccaccgtggatacggtgatattgcgtgcggaaatgccaaagccctccggcggcatcgcagaaatctggcgcacggcggaaagcacggaattgtagttgcccatcggctcgcccatgcccatgaacacgatattgcttaagcggccttctcccccggccacttcaccatcgcgcatcattttggcggccacacgtacctgttcgacgatctcgccggtggacatgttgcgggtcaaacccagcttgccagtggcgcagaacgggcatcccatgccgcaaccgacctgcgaggaaatgcacagcgtggtacgggtcgggtaccgcataagtaccgattcgatcaaggagccgtcaaacagcttccataacgtcttgatagtggtgccctcatcggccacctgacgggtcacttcggtgatgagctgcgggaagaatgcagcagcggcctcatcacgcttcgcagcgggaaaatcggtgaattccgcggcattcacatcgaaatgcccgaaataatgattggccaactgcttgacgcggaatttaggcagtcccaattcggccgccttttcaatacgctgcgcgggagtcatatccacgaaatgcagcggcggcttgcctcgccgggcgtgatctttggaaagcacgtcgcggaaagctccagacgtaccaccaggagtgatgccggtctccggggtatcgatttcaggtatggtcataaccagtcgttccactctcaatcggtcacagtccggtgacccacagcaacgcacaggtgaacggcgcgctcatcagaatcgaatccacgcgatccatcactccgccgtgccccttcaacagatggcccatgtccttgatgccgatatcacgcttgagcatggaggcgcacaaatcgccaaacgtgccaactgcaccaatcagaatgcccgctacaatcggcacccaccaacggctggtctgcaacgacgggtcataggtgaagatgaatacggcaaacgagccaatcatggcgaacagcatcgagccaatcagaccttcgacggacttcttcggcgaaatgcgcgggctgagcttgtgcttgccgagccatgcgccggcaaacagaccacccgtatcagacagtgcaggcatgaacaccagcatgatggcatgggcaataggatgatcgttgaacgtcagcggaatgatgatgcagctggccagcaacggaatgtagagcacggtcagcacggaaactgccacatggctcaaccgggagtgatgctgttcaccgccgtcgtgattgtatgaggattccagacgagcgctggcgtccgtgttggacagtttgccggcgaccgccagagaaagccggttgccaagcgtaagctttgcgcttgcggcgatggcaacaagaatgatggagacgatgacgctcagcgacatcgtgatgagatggtagggagaataatacgtggcaatcagggtgaaggaggagcagatccagagcataactacaggaatgtgcagtcctaccgtggcgaagtccacgcggagttcccagagtgccagaatcatgaacgcaacgaccaacagcacgaacacatcaatgctgagcaacaggcaagcgacgatcagtatgaccagtgccgcacccgtggcaattgcctgaggcatattgcgaccagtcttcttgttgatctgatcgagagcctcttcggcctcttcatggagttgttcgttgcgttccatagccattctccaggtctgatcgaatcagacctccatgatctccttctgcttggtgtccagcagagcatcaatctcatcagtaacggacttggtgaccttgtcgagatccttgagcagacgatcgccctcgtcctcgcccatgtcgccgtccttgacagacttatcgatggtttccttggtcttgcggcgaatgttgcgcacggccaccttgccatcctcggccttggacttggcgagcttgacgtattccttgcggcgatcctcggtgagttccggcatggtcagacggatgacattgccgtcgcggttcgggctgacacccagatcggagttgcgaatggccttctccaccgcggcagcctgagaggcgtcaaacggggtgacggacagggtgcggggctcaggcacaccgatggaggccacggccttgatcggcgtcggagcaccgtagtaatcgaccacaatgccgttcagcagagccggattggcgcgaccggtacgaataccagcgaagttctctttggtgttttccacggtcttggccatctgttccttggcctgatcgatgagggacatgttcactccttgtgtttggggttcttctatgaacgcttgtattcgattgtaggcgctcgggactactcggccacgcgcgactcggcggtggagaccaatgtgccgatctcttcgccaatcagggcgcgggtcacgttgccggttccttcaagaccgaacacacggatgcgcttcttgttgtcgcgggccatggaaagcgcggatgcgtccataacggccagattgtcgaccagcgcacggttgtagctcagggtctcgaagcgcttggcttcaggatccttgcgcggatcggcggtgtatacgccgtcgacgccgttcttgcccatcagcacctcatcgcagtggatttccagagagcgctggatggagacggtatcagtggagaagtacggcatacctgcgccggcaccgaaaatcaccacacgccccttttcaagatggcgaatggccttcagtggaatgtacggctcagcgacctgccccatggtgatggcggtctgcacgcgggtggcctggccctcctgctcgaggaagtcctgcaacgccaggcagttcatgaccgtgccgagcatgcccatgtaatcgccacgggaacggtcgataccggcctgttgcagctcagcgccacggaagaagttgccgccgccgaccacgatggccacctgcacgccctgctgcacagcgggaacgatttcctcggcgatacgacgaatcacgtgggtgtcgatgccgaccttgcctccgccgaatgcctcgccggacagcttgagcagaactctgcgcggcttatcgctatcagtcatattgatgccttccttcaaccgaaaatgcctgaaaatatccgtagacaagcgtatcggcttacaacgacaccccttgcagcgacaccctcggtatacagacaaaaacgccacccggctgcaatcagccagatggcgttttgaaaattacgctagtcgcgtgaaatgagcgctaggctcactcctcttcgcccttgccgacttcgacgcgagcgaaagcagtggcgttgccaccgacttccttgaacagggcgccgacggtcttggacggatccttgacgaacggctgctcgaggagcacgacttccttgaagaaagcgttgagacggccttcgacgatcttcggaatgatcttctccggcttgccttcggcctgggacttctcggtggccacgcgacgctcggactcgaccacatcggccggcacgtcctcgcgggtcagccacttggcacccatagcggagatctgcagggcggcttcgtgagccacggcggcaccggccttgtcggtggcgatcatggcgacgatgctcggcggcatctcggcggacttcttgtgagcgtaaatctcgacgtgctcgccggaaatcttggcgaactggccgaccttgacatgctcaccgaacagagcggcggcctcttcgacagccagcttgacggtggtgtcgccagccttggcgccttccagctcctcagcggagttggcgtcggcgtccacggcgtagccgagcacttcgtcagcgaactcgacgaacttcggggtcttggccacgaagtcggtctcggagttcagctcgacggcgtaaccggtctcgccattggcggtctcgacgaccttggaggcgatggtgccttcctgagccttgcgaccctcacgcttgccagctgcggcgatgcccttggcgcggatgatctccttggcacgagcgacgtcgccttcagcctcggtgagagccttcttgacgtcgagcatgccggcgccggtgtcttcacgaacctgcttgatcagtgcggcggtaattgctgccattgattattctcctttaagaagatgttgcttaccgtgtgagcgatgggaggcgctgttaccagtgcttcccatcgcgtagtatcactcggccttgggggcctcagcggtctcctcagcagcggccggagcagcggcttcggcttcggcaggagcctcgttggtcaggagttccttctcccaagcggccatcggctgctcggcggtctcgccctcagccttggcggcctggccggaacgctccagcagaccctcggcgacggcgtcggccatcaggctggtgagcagctcgatgccgcgaatggcgtcgtcgttggccgggatcgggtactcgacggtgtccggatcggcgttggtgtcgaccagggcgacaaccgggatgcccagcttgtgagcttcctcaacagccagggattccttggtgatgtcgaccacgaacatcgcggacggggtgcggttcatgttgcggataccgcccagctgcttgttgagcttgtccttctcgcgctcgagcaggaggagctccttcttggtcaggccggagccgtgcacgtcggagaagtccatctcctcaagttccttgaggcggttgacgcgcttggaaacggtctggaagttggtcagcatgccgccgagccagcgctcggagacgtagggcatgttcacgcgggtggcctggttggcaatagcttcctgagactgcttcttggtgccgacaaagagcacagtgccgttgtgggccacggtggtcttgatgaagtcgtacgccttgtcgatcatgtcgagcgacttgaacaggttgatgatgtggatgccgttgcgctgggtgaggatgaactgcttcatcttcgggttccaacgacgggtctggtggccgaagtgcaggccagccttcagcatctcgctcatagtgatctgagccatggtattactacctttcattgtcggttcttgcctggccatgcgcacctgcgtgcagctactcccccgttgtttcacgggcttgcagccgaccgacacaggccgtcgcgagcatgacgcgaatttgttgtgtgccggttgacaataatgggtggctccgaacgccagcgactgcgctcgttgccgggtggcacacaaaattcgagaatagcatgacccgagaataatatgttcccgttggagggagctgtcgaacggagcgagaccgagggtggttgaagtggaccaccctcagtcagcttcgctgacagctccctccagcgggagccaagaacggactacttttgatgttcgcgcatgtacttcatggcagcgcgacgctcttccttttcgaggcgatccaggtaaacgtgtccgtcaaggtgatcgcattcatgttgaagcatacgacccataatgccagtgccctcgagcacaatttccttgccgtccaaatcaatgccacgcacacgggcatactcggccctgcgggtcttgtaccacagtcctggcacggacaagcatccctcgtcaccgtactgttcgccggatttctcctcgagtaccgggttcagcacgtagccaaccttcccatcgatgttgtatgagaaagccctcaaactgacgccaatctggttggcggacaggccagcacgtcccggatcgtccaccgtttccagcagatcatcaaccagtcggcgcacggcaggcgtgatttccttaatctcgtcgcagggggtacgcaggacggggtcaggcacgaccctgatctcacgaatggccacttctcgttactcctcgttgttctcgccggctgactgatcaggcagctcatcggcagttgcctctgcggactcgccttcctcagcctcatcggcttcgttcttcgtcttcttgattttctccgacacgctagcaatcgaatcagacacgctggccttcatctgctcggaagcctgcttgacctgttccgaggcctgcttgacctgctcggaagatttcttgacggttgccaccgtgctgtcgatgatctttgccgtggtcggcaatggtttgttggaaggcttgggcgcgtacaggtcttcttcgatgatggctgtgtaacgctgcagcaccttaggacgcaccaccttcatgctcggggtgagcgtgccatgttcctgattgaattcctcgtcgagaatcgcgaacttgcgcacggattcggcgcgggacacattggcattggcctgatcgatgtactgctgcacgaaagcgcgcaccgcatcgttgccgctggcctcggctagcgacatatcagggtcaaggccctgtccttccagccacgaatgcagcatctcagggtcaagctcaatcagtgcggaaacgaagggcttaccatcgccgaccaccaccgcgtgagcgacgattggacaggtgtcgatgacatcttccatgggtgccgggctgatgttcttgccgccggcggtaatgatgatgtctttcttacggccggtgatgtatgtgaaaccacggtcttcgatacgtccaagatcaccggttttgatccaaccgtcggcggtcattgcctgggcggtgagttccggctgcttgtaatagccgaggaacacgttcggaccggtgagctcgatttcgtcatcctcgccaagacgcacgcccataccgggaccgggcttgccgaccgatccgacctcgttgtcatcctcccagttgaccagcatcggagcggcggtttcggtcatgccgtatccctgaatgaatgtgatgtcgtccatgccattgaagaaatgagccagatccacgttcagcggagcaccaccgcaggccagccatttgagattcgggccaagggcggaacgaatcgacttgccgactgtggacataaagaaggaatgcgccatacggtcgatgaacgaatgaccatgccccgactgctcgtccttgctccacttgacgaagtgcttgacggacagggcaaaaatatggccttgaacgcccgcgccggctttctgcgaggcggcgttgtataccttctcgaacacacggggcacaccaagcaggtaggtgggtttgaagctgcgaatgtcggcgagcagatgcttggcatcgggaatgtatccgaccacaccgcagccgccgatgcatacatattggatgtaccgcgcgaagcagtgcgcaagcggcaggaagagcagcaggcgattgtcgtcatagagcatgccacgcagaatctcatagccgttgagcacaatatgcgtgtagttgcgattcgagagcatggcccccttgggcttgccggtggaaccggaggtgtagaccacagtcagcaaatcgtcggccttgatgcgcgcaatggcagcgtccaagatctcgtcggatacgttttgtccgaaatcggcaaccgcatcgagcccatcggccttgaagttgaacacatatttcaggcccggatgtgcagcgcgaatctgctccaacgtttgcgcatgctggaaaccaccggcaaaggctatgaccggatcgacctcttccacaatgccggcagtctgcttggcggaatcagtctcatacaccggaaccacaaccgctccgatagccgcacaggcaaaatcagccacgccccactcgtaacaggtgggcgagtagataagcaccatgctcccggccttcacgccgaggccgagcagtcccttggccacctcgcggacacggctgagcatttccgttgcagtggcgccacgccattgatgggtatcgtcatcctgccattcggcaatggtgtcatccggcgtgcgggctgcacgcttgaccagcagagagaacaccgtgtcctcgtcggtggtgacatacctaggttcttcaacatgttcacgcatacgctctactataggcgcgacctgtcctatgactacgccgtccgcatgaagtcatgtcagctttgagccgaaacgctaccccaaatcggcaaagacacacatccatctggaaccgatataccggaacttgagattcacccgcaaatcttcctggccgatggtcatgaataccaccatctccatcgtgtccgcgccggtgatcacgccatcaatcaaagtcggcactgtgggcagatagcagaatttggttttgatttccggatgagtcaccatatgggaatccagcaagtactgcatggttctcagacgttccagacaagggttggtcagcgctcggcgcaaatgatccacgctaagcttgcctcggatggcatcggcgcaattgcaggcgattcgacatgcagccatcgccatcgtatggcattcccgcgcactcatgctgctggcgaaggtaggttgtatgtggtacttgaccggacgatccgataactctacgacgatgaatccgtcataccccggcaaaggcccgcatcgacgcatatcaaaaaagcccgtatattccatggaatccccctcgatccctctcgaggcccaccaccatcggcaggcgcaggattacacaacatcatgaaaaggcgtgtcaagtcaagtaacttgacacgcctttctcacatgatggattagttcatggaacgcgaacgtcttgcgatcagcggctggaatacgggttgaccaccatgccgcaacgctggaagttcttcacatcgacatagccggtggaagccatcgcacgcttcaacgcaccaatgaagttcgtcttgccatccgcttcatggctcggtccgaacaggacctgctccagagacccaaccgtgccgaccgtggtacgatagccacgcggcaacgtctgatgacgggcctccgcaccccagtgagtgcccttaccaggagcctcagtggcacgcgccaacggagcgccaagcataaccgcgtcagcaccaagagccagcgccttgacgaagctgccggagtcgcccatgccaccgtctgcgatgacctgtacgtagcggccgccagattcgtccatgtagtcacgacgggcttcggccacgtctgcaatggcggtggccatcggagcctgtacgccgatggtctggcgagtggcggaaactgcgccgccgccgaagccaacaagtacgccggccgcgccggtgcgcatcaggtgcaaggctgcagtgtagttggatgctccgccgacgatgacgggcacatcaaggtcatagatgaacttcttcaggttcaacggttcctgaccggaagacacatgctcagcagacaccacagtgccgcgaatcacaaacaaatctacgcctgcatcaaccacggtggagtagaactgctgggtgcgctgcggagaaagcgcgccggcaacggtaacgccagcgttacgaatctcgtgcagacgttgggtgatgagttccggcttaaccggctcggcgtaaatctgctgaatgcgagtggtggcttcttcggccggcagaccggcgatttcatccaacagcgaggtcgggtcctcgtaacgggtccacagcccttccaagtcgagcacgccaagcgcgcccatcttgcccatggcgatggcggtggccgggctggtcaccgaatccatgggagcgccaattaccggcacgtcgaactcgtaggcatcgatctgccaagaagtagagacatcttcggggtcgcgggtgcggcgagaggggacgatggccacatcatcgagtgcgtagccgagacggccctttttgcccaaaccgatttcaatttcctgagacatggcttccacactattgctcgggtgggacgctcatgtctcactttcccacagaccggacgattgtttcgcgccgttacaaacatgcgctaagactaaaaccatcttcacatcatctatcaggaggaagcatggccaaaatcaaggtcgaaggcaccgttgtcgaactcgacggcgacgagatgacccgcgtgatctggaaggacatcaaggatcgtctgattctgccgtacctcgacgtgaacctcgactactacgatctgggtatcgagcaccgtgacgaaaccgatgatcaggtgaccatcgatgccgcccacgccattcagaagcatcatgtcggcgtcaagtgcgcgaccatcacccccgatgaggcacgagtcaaggaattcggcctcaaaaagatgtggaagtcccccaacggcaccatccgcaacattcttggcggcaccatcttccgcgagccgattgtgatgagcaacgtgccgcgtctggtgcccggctggaccaaaccgatcgtcgtggcccgtcacgccttcggcgaccagtacaaggccaccgatttcaaggtaccgggcgccggccagcttaccgtgaccttcaccccggacgatggcagcgaaccgattcagcacgtggtgcacaactacggcgaagacggcggcgtggcccaggtacagtacaacgttaacgattccattcgcggctttgcccgcgcctgcttcaactacggtctgatgcgccactaccccgtgtacctgtccaccaaaaacacgattttgaaggcctacgacggccagttcaaggacatcttcgccgaagtgttcgagaccgagtacaaggacaagtacgaggccgccggtttgacctatgagcaccgtctgattgacgatatggtggccagctccctgaagtggcatggcggctacatctgggcctgcaagaactacgatggcgatgtgcagtccgattccgtggcacagggcttcggatcgctgggcctcatgacttccgtgctgatgaccccggacggccagaccgtcgaggccgaggccgcccacggtaccgtgactcgccattaccgccgttggctcaagggcgagaagacctccaccaacccgattgcctccatcttcgcttggaccggcggtctcaagcaccgtgccgacctagacgacactcccaaggtccgtcatttcgccgaaacgctggaaaaggtcatcgtcgacaccgttgaaggcggtcagatgaccaaggatctggccatgctcatcggcccggacgagccgtggctcgataccgaaggcttcatgaacgcgctggacgagaacctgcagaaggctctggccaagtaagtcgagcggtttttcgacacatcaaccctgattgttcccggatatgtggtgattcctccacatatccgggacttttttctactccgccctactagaatcgtgaaccagtgctactcgccccaaggaggttttgcccgcttatggtgttcacacgccgcccagccgccgttcttaccgccatcgttgccgcttgcgcgatggcaatatcgctgaccgcgtgcaccaccgacgcgaattcgcaggacacggcggacgatcggaccacggtcacttcgtccgccccgggagtcgtggccatgttcactccttccgacggcatcacgctgaaccagcagaccccgttgaacaagtgggcaaagctgacaccgaatctcaccaaggccctgacctccgccggattcaagaagggcgatatttcccacacgacttccgattccctggacaagcagagccgcgccatccaggactatgtagtcaatcatctttccggcagcaacaccaccgatgatgccggcatcgtcatctcccccgacaacatcaccctgctggtggcaccggtagtcgaggccgatgcctccacccgccagtacggggactatgtcagccaggagctcagcaccgccgacaccgctgaaggcagtgattccacggattcgtctgattcgtccaattcgtcagactcgtcggattcatctacgggttctgattccaccgatgattcgtcatccgacgcatccaaaacggtcggcgattccaagaacgcggcccaagctgaagcggtggatcgactggtgtcgtcactgaaactggctaaagagtccggcatgcatgtggtgctcatgggcaacagcatcaaaggctacaaaccagacgccttcgtcaggttctcggatgcgcaggccatcggcaagctgcaggccgaaaaaatcgtatccaagcttgaactcagcaaggccagcaaagacaatcccaagtacatcgaagtgctgatgccgtataccgctgtggatgagtcaggcgaggccagcgactccacctttgcccaagaagcgttccgcggcatctggcaggtgctgggcgcctactaccaaaaaggcgttgtggaaagtccttcaggtacattgaacggcaactccaccgaggatgattggcaatccgtggcctacgacgcgtccaaggaaggatccaccgcaaaggtactcgacgcgcgcttggccaaagccgacgaacatgcctctcccacccgcattgacggcatcatcgccatgaatgactacatcgcctcggaagtcgtcacggaactggacgatcttggatataccggatccgctgctgatatcaatcctcaaatcactatttccggcatagtcggcaacatcaccggcaagaaggatctgagccgcagcgatgttcctgaccccatcaagtctcccgaaaaagacgattcggccgattccaccgattccgcagatacccaggacgactccaccgccacggataaaaccgataagaccaaggactcgcaatggcctctggttaccggatatggtgcctacgtctcgaatatcccgtctatcgtgaacggcaaacaatggatgaccggcatagaggatcgccagaccttggccgagaacattgctgaggcatgcgcactgctcaacaagggccaaacattgacttccatgtcttccgtgcggaataccgaagtgggcggtaagaaaaaggttcccaccatcagcgggccgcttttggccgtcagcgccagcaatctcaaggtcacattgatcgatccgggatatatctctttggccgatgccggcttgtaaaccgagcctgaatcataacggtttcaacacgatcttctgattccccgcataccgctgtggatccagataatcatcttccccgcgcttgaggccccagtgcaggcactgccctgtgcaatggtccgacgcaccaccaaccgtaccgatgaactgcccctgcgtaaccgctgcgccaaccgtcagcgtcgtggtcgccggctcgaacgtcgagatcacaccattgctatggcgcatgctgaccacgtccttctccgccactttcccagcaaaacgtattattcccgcctggggtgccacaatcacggttccggcctgtgccgtgagatctatcccgcgatgtccggacaaccaccgtttggccggtttctcgaactcccgttcaatccgcgggtcaagcaccggccatccgcaaagggcctcgcattgccgatccgactgcggttgtgtcgcataggcatgcttcgcatccccattcggcatcgcaattccaagacctaacggcagtaacagccccagaatgagagctactgcacacatggcacgtttctgttcctgtgcctttcgatgctctctgcgacgccatatagacgcttttctggccgcctcacggcgtttgtttgcatgatatgcacgcatgagttccccattcccctgttcaggccggtttccgctccggttcttccacagtgaagcggtgacagaggaatgtccagctgaatcgggatatgtggttccagcttgccagttatccacaacggcgtgttgcttacaattcggcaagatgattcaaatattgactaccgagccgcaaatcacttgattgaacatagtccagatacgacgaaaccccttgatttccaaggggtttcaggtagctcctgcggctgggcttgaaccagcgaccgtccgattaacagtcggatgctctgccaactgagctacgcaggaatatttagttttcccggccagtctcctgaccaggcgagctcctgcgactgggcttgaaccagtgatcgtccgatatacggttctggctcgcagccgtagggctttttgcaacaggagtagacaatacaccagccttgctgttccttcaaatcggcgtgtcatcgcgcatgttcgccttgcagctggttttccgaagagcatcggccagaaacgcgcaatagtattccttgggaagtgatgaagaagtcacttcccttttctatgcgcttaaggagccccatgaggtattggaacgacaacaggaagagctgcgaacacgtcgagccacgggaggattggaaagaatccattgagaaatggatcgactggatggacgccatcggacgcacgaacgacaccctgcgcacccgctggtaccagatcgttcgattctccaaagccgtcgataaaagcatcaccgacgtgaccgaagacgacctcatattctacctagccggcatgggaaccgaaggcagacgcggagtacgcagctgcgtcaaggtcttctaccaatggagcatgaagcgagggctcgcccgccgcaatccggcggacgaagtgcccaccgtgcccatgacccttccgtccggctgcatctgtcccgaggagaacatcgaacaaggactcgcatcacccgacgagaacgcgcggctggccgtcatgctgggcgcgttctgcggcctgcgccgcatcgaaatgaccagaatcaacctgaagaccgatctggaggagaacgccgagggcatggtgctccacgtccacggcaagggcaacaaggagcggatgcttcccgtgccggcaaagctcgcttcggcattgcggaaacgcaccggcgtatggctgttccccggagacgtgcagggacactgcggcgtcgattacgtggcgaagaggatcaagacggtaaccggatacccgtcgcacagcctgcgccgtaggttcgccacatgcgtctactacaggaacggctgcaacatcgtgcttgtcagccgtatgctggggcacgccaacatcgccaccaccatgcgttacatcggcctcgtgcaggacgagatgcgcaacgccgtggaatccaccacccgcacggacatgagactgaccatgcccatgaaccaggtcgtcggaacagccggcagcgtcgccacctattcccttagcgccgcgaggatcggatgaacaaacggtatacgccaacatgcttctttgcgcatattggcgtataccaacaccgctcaccgagtgttcccgagactggaaagcggcaacgcggctatgtctatccccagcgcatcggctgcggagaacaccgcttcaatcggggcttcgccccgctggagcagagcatcggcaagccggggatcgataccggcctgggaggcaaggtcgtcggcgttccaggaatggttcgcggtctcttcacggaaggcggctgcgatatccgattcggtgcgggcgaaaagagtccggcgttcacgcggcgcttggaaacgactaaggtaacgcgcgtactccaattgcgcctttgtcggctcaggcaacttatagtccagattcgacatcgcagacctccttagcgttcagcgggttggactggagtcgttcgacgcaccgaaaatagggaatccgggaaccgcatcggccgacgatggagtgcctggagtgccgtacaacgtcccgatctgttcgatcgcccatgcgctccaacgtggggattcgaccgtggatgtcatcaggccggcggggaggaaccggcgcatctcgtcggcgaaggcatccgagccgatcacatcggcgacccccgccacgcgatcagcacggtctgcccaaagtccttcttcgccgtaatcagatgatttcaattccgcaagctccatcgcccgtcgggaatcgacgtcgcctctcgacgccaaccagcacatgtcccacaggtcgcgtcgccgcaggtgcgatgcgcaggcataggagagcagcttgtcggcaagaatctcggtggggctttccacatcgaggatgatctgacccgacaaggccgggaacatcggatagttgaccaaggcgggacgatgctgcggctcgtacgcgggaatcgatgccacctccagcttgattgtctggctcggcagatccttgcgctgaccggccgtgcgaatcgctatacgccatctgcgcgtcagcccatcggcgtcgggtctcggctccttgacccggaccgtcacatcatcgcccatccccgagagcgaatcggagatgcaggagccaagccctttaagggtgtccatgtcgaacgaggtgccgccggcaaaatcaaggtcctcgctgtacctcggggacccgtggcacaggcgcagactcgtgccgccctggaacaccagcgaggagaagaaaccctcgcgcatcatggcgtccaggattcgataatgcagaagttccttctcgaccacgggaagcagattgcccatgccctcgcccccggccaagacgatcccggccgccatagccttgtagtcataggtgccgtcagctccagtcatcatcgtcctccaattcgtccatgtccaccagatcgaggttgcgtccgacggccttcaggtcacgatacgcccactgtttcgacgcgagcggcgtcagtccgtcatcgcgggcgatcaggttcggcaggatgcgactccagctgagcttgcagtgcgtgaactcgatcaccccgtacgcggtgcggaactcgccctcacggcccgtggtcatgaacgtgaccctatccaccggaatctggctgatcacgttccagcgcgacagagcgctttcgaggctttcccacaccagctcgccggaacgcaaccgctttgcgacctgatgaagtgtcccctcgccgagatgggaggaatacgcgaacacgtagacgccacgggcggcacggaccaacgccttcgccgataccaggctggacagggttcggttcagtttctgcccctgctcacccagcacgacggccagttcgttcttgcaatacacgtagcacgagtacttggcatccatctcgcgcagctggtcaatcgcctcgctcctcttcatgcatataagtgtacatgaatatatgtaaaaacgcatattcatgtacacctatcacaatcctgaagcgttccaatcagagggaacgccctcgtgccggaccgtcttcgagaccaatcccgtcgatggcgttttccgagaaagggttctctcttaatctgccgacgatttccgctacggcgcgctcttcctgatcaacgcattggacaagctgggaaatgaacggcttgggatcgccgtcaacctgccatgcttccagacttttcccatagctgcggccggcatcatgtttgattgctacgggccggtagccggcagccatgagcatgagattcagaatctgtcgcccggttcgcccgttgccgtccgtgaatggatggatgttctcgaacatcgcgtggaatccgattcgaggtcggattgcgtcaaaatcatcatggactcctttcgcgtctattggatggctgccggcgaatccggttgcaggcagcccatcgtcgggtcggtcggatcgcatactccggcggacagttcgtccttttcctgtgatgccggtgatggttcgggcatcgcggcgagcttgtcgaatgtgttgaggaatgcggctatctcccggtcgctgctgatgggatccatgcccctggccttcgtcagggcgcgtatgaagtcgaggtgattgtccgcgaacgcgccgaaacgttcgaaatcaccgcccttgatgccggtcgtgtcctgctcgtacaggctcgtatattcgtcgcccatgcgttcggcgaagtccctcaccctggcatcgatgtcccattcgatgggcgggcatccgaacgcgagttccacgtaccggggctccacggccaggccccgatcggttttcaggtcgttccagaagcggtccacggattccttgccgccgtcgtagtggcggcctgcggcgtcgaacggttcgccagcccatgactgctcgtaggattccaatgcctcgcatccctggtcggtgagctggcgtatctccacctccacactgccgtcgtggtggtggccgcgcatcttcaggattccgttctcgtcccagatgtggtcgatctcgcagtccttgaacggggaatcatcgccgttcatcagatcatcgaaggtctcgaacgaggatatgcccgtgcgttcgccgtcccatcggcctatgcttccgaacgcgatcagcgggttgcctcccatcgggttcctgtacgaggagagcgccgactgggatccattgaagaaatcacgcagagcgccggcctccatcctgtaatcggtttgacgggattcgtccgcgaaggcatcgaacgtgatcgacgtgccgctctcctcgtacagccgccacaggctgtcggcgcgggtgctgtgttcacggtaatacgggtccccgtattgcgggtcgtagtcgtcagcgttgtagatgtaccgtttgcggggttcgggatcccgaatctcgtcgatccaattcatgtccatcgtgtgctccttggttctgttcgtcgttgccgtacggcgtcagcggccgtgtgtcgtttccatgccgtcatccaacgcgaggccgagccctgcggtctcaagagacgtttcctgtgggtcggcccagccgacggcgaggtccagcgcgccgcgcaacgcctggccggaaagccggtacgtccaggaatcgtttgcctcgtaagggaaggattcgccggacacgatgccgcgctcgtcatgcaggctcacgtcgaacgttccgggtttggccgtgatcagcgcatgacgggcggaaccgggagccgagacctccagcgcctttctgccgtcgggagacccggtggcggtgaatttgatatcggggtggtgcgcgaggctgtaggaagcgttggactcacacgccagcgggaccgtatctcccagcccgctgtctgcggccagctgctgtgggctgtaatccatgccctgcgtgtagtcgatgggctgcgcgtcggtgtagaagcatccgccgccatcgtccgcgtcgatcaggtcgcccacgagccggtccaggcgtgcggggtcgtcccatgcgctcacgagtctggcgggttcggcctggttcttccatgccatgtagcggtcgcgttggtcgccgcagatgccgtcgaatgattcctgggaggtgaacgtgccgccgtccaattggtagcattccccgtccgggtccaacgcgcgctccttgaactccttttcggcggcggcgtacaggcgcttgtcgagcggttccatggccgcgtcgatgcccgccatcatctcgtccacgtgttgccgcatgtcgggctggctcgttttccaccatgcctgcaagtcggcgagcacgtcggcggcgttctcccgttcgcacacgtcgagcaggtcatcgtcgtaattttccaccgtccaggagtagaaatcccagtcactcgaaccggtcaggcgttcgatgctcttcatgcggtggaagtccatcaacccgccgccgtgctcgcgcacgatgcccgccaacggcagatcggcctcgtccatcaggcctttccagtattcggggacattcccgttctccatgtcgttctcctttccgaacgccttttcgatcacgagcgggtctcgtgggtcaacagtgcggtcgatccgcagtatctcgggcatgaccgcctcgctttcacggccgatgacgaacgtgccgataccggccttgacgcgatgctcgggaagccttcccgaaccgtcgcacatcaccgccggccggaacagcgaatccccgtaggcgagcgtcaccgtgtcgcccggcctggcgagaacccgttcgacggccatgcgtgagaggccgtgcgcgtcgagacggccggaacgccaatcgttggcctcggctgctgtcagggtgaaggaaacggaacgccctccctgggccgaggtcacgtcgagcctgaccggctgcatggcctcgaaaccgatccagatgccttccggcgtcctgtccggggctttcacgtcaatgtccgtgaacccgtattcggtcagcacgtccgtgaccctgatcctgagcgcgttgtcgggaggcagatcagggcgttcattgggaatcgggagcgaggacgcctcgaaccacacgtcctcgctcggatcggtgtcgaagccgccgtccgcgtcggaatacgccatgtggacgccgaactccaattccttggcatcggcggaagagaccagaatcgcgttccccagcacgagatcgcgcgcgttcctgcgcaggatggattgcatgtcgggcttggcgggattcccggccgcgagcaggtcacggttcacaccctccatgtcaaaaggcgtcaaggccatctcgttcgccttttctcacttggaaaggccggaaccggccgtatcggtcatattcagcgggtccgaggggtcgcacgcctgcgcgcgttccgtgaacgaggtgacggcaccgggcagcacatatcccagatcgaggtcgatcgggctcacgccatcgtcttcgccgatggatgctgcgggcactgcgcccatggtctcgcgcagcacgtccacggcatcgccagtagcggcgcgcgcgtcgatgatccggtgcatcgtgtcctcaagcgcggcatggatatcggtggaaccctcctccacgatgcactggtatgagggggctccccagttcgtgccggtgccggaaatcgtgtagtccgcgatgcgttcgcccggctggacgagcgaggcgagatcgaacgcggccggcgaaccggtcttcgcgtcgaaatcatccagccattcgacctcctcggcgatctcctcgcgcgagtaccgtccgtcgatatcgctcggccagtccgcgtcctccagatagccgttgtcgccaagcgacacatcgccgtcgagcttgaggtcccggccgtacatctccatatcgatcagatagccgagccctgtatcgaacatggatcgcacggcatccgatgcccacccctggttcacggcggtccaggcatacttcgcctccttcgagtccggccataacggcgcatcataagagtgataggggatctcgtccgagttcaacgcgaggttcgcgtactgcaacggggtgcgcggggccgcgtcaagatcgtcgcggatcatccgcaccttctcgtacacgtccgggtcgtcgtcctcgcgcgactcgaaagcacggcacatgaggttcaggtccgtcagcgactcgtattcgacgggattcgccacggtggcgagcagtccttccccgccctcgtagtcgtggatcgcgtactcctcgtaccggccgcccaatcccacctcggtcttcagggtgtcctgcaagcgttcggcgggcatgggcagcgtgatccacgcgccctgcaacgcgccctccgcgtatttgcccaggttggcgacgtacacgctgatctggtagtccttcaatccggccatgatgatgctccttcgctcgggtcttttatcgtgtggctgcggctgaggcagacgggtcggcaatgctcaacgggtcggccgggttcgcgggatcgtaggtttcggacgtttcggcctcctcgccttcgtctttgcgggcgagccggccgtcgtccaccatcgcgtcgatgatctcccatccttcctcgatgctgcggtcccgcaattctctggccgagatcatgtcgcgcatcgcgtccatgttctcgttgttgtcgggccagtcatggtccttcagccagtgccgaaggtcctcctccgtccagcggatctccgcaatcgtttcattgccttgcccggcgttgctttgatcgggatgaagcaacgcctcagatcggagaccgaaatacgctttgtcttcctggaggccggacaggaagccggagggcgtgaacccgttgcgtgccgcgaactcgcgggaccagtattcgtcgaactcctcgtcggggtcgaagtcgaggagcccgtccgccatggcgcgcctcagccccttctcgtccgtctcggccggcaccgtgaccgagaccgtggcgtggttgggtgcctccagcgtcatgtacagttcgctgcggccggcgtagcgttggatgaagcattccccgttgccccagtcgagctcgtgctgctcgatcagctccttcgccttgtcggtcagggcccgttcctggggcgtgtattcgtcgggttccatcagcatgatgcgtccttccttcccttggatgatcggtgccgcgccgtccggcgggcatggctccgatcatcagcccatacgggcggtcgcgcggggcatggcgtctacgggtcagatgattccgccgagattttcctcagtaccagttgtgggcgagccagaacgtcttggcggcgctggggctgccgtaccgtccggcgatgtagttcaatccccatctgatctgggtggcggcgttgtccttccagtcatcgccggccgatgccagtttcgacgcgggcaacgcctggggtatgccgtaagcgccgctgctcgggttggtggcattccactgccatcccgattccttgttccacaaccatacgagcgcgtcatagtcgccgtcgccccagtccttgtacgaggcgatcatcttcctggcgatggcccgggcctgttccggcgtggcgtgggtgccgtcgccgtcgtagtccaccaccacgtccgtggagcccgagtcggaactggagcacgtccatgccgcctccaccggatccgaagaggaggacgacgaatcggacgaatcggaaccggatgacgcggaatccgtgccggtggaaccattggtggacacactgccgttgggcaggatatagaccgcgccgacgtcgatcctgtgcgtgcggtggttgacgatgcccaggccgccgcgcccgttcatctcgctgatcgtgacggttccggccttggcgtccacgctttccacgatggcgacgtgcccgtagagggtgtccgcgtcggccacgccgggcgggtagctgacgatgctgccggccacgggatcggtgcgggtggtcttccatccggcggcggtggcgctggccgcccagtcgccgccgttgccccagtaggagcccacgtccaatccgattttatggcctctcatgcacgcccaccaggtgcattgcccgtccggataggcctggcacacgttgtcgggcccgtcggatccgttgaaccacgccttggcatgcgcgatggtcatgccgtcacgcacctcgccggtgacgacgcttcccgtggtgcctcccgacgatccggtggagccgccgtccttgcatccgccgaggaccgcgagcacggtcaacggcgtgcatccgccgagcagggacagcaggcacgccgagagcatggccgcgaggatccgatggcggctggtccggctcattgcgtgttcctcagcgaccagaagggcttctgcccgccgaccacgacctccacggtccggcaggggtgctggaccgtgccgtatccggtggcggagatcaccgtgtacgcctcgtcgccggccttcacctgatcggggtcgagctcgttggcgtccttgtccagcaatggcgcgtcgagcgcggccgggcagtagacggtgacgtgccagttgccgtcgtccatcggcaagagcaccgtgttgtacgcctggctgacggtctgctgcggatccgtcgtggatgacggtccgccgccttccgggatcgggaagctggtttccttcgtcgtccagaacggctgggactggatggcatccgtatccgagccctcccatctgccgtcggaggtgcaggtgtaggcgtagttgacgtacttgtcatcgtattggcccgagcatacggatccggcgcggaagcggcgctgggtccaccaccagcgcggcgcgtcggagaccggatggctctccccggcaccgtcgtcgccgagcagcgcgaacacgtccttgcgccattcgtcgtcgctgccgtttggatcgagcagcgcgtccaccgtttccaatgcggtgtcgatcgggccggaaccattgtgcagcgtgatgccgtccgcgttttcggagagcgtgcgggtgccgtccttgtgggtgtcaatggggaacgcggtggtgcgctgagaccagtcgccgggaaccgggattcccgccgcctccaggccggcgtaccgttgcgggctcgattccgttttccttttgcccgtggactcctgtttcgcgtccgttgcggaaccgtggtcatcgccggccgttgacggctggtggttggcgacgatgacgcccagcgagcacacgaggagcgcggcgacgagcaggcacaatacgcgcagcggtttcggcagcggccgcggttccggccggttcacgattcaccgccttcccaacggttcggctcgcccggcataccgccttccatgtttccttccatggccggatgctcccgctcggggttcacggttcccggatccgtgttttcgggtgatccgtcttccgtccccgtccatcgcgcgtctatgaggtcgtccgccgttttcagttcggcgctggtgtttcccgcgtccttcgccttcctgcgcagcagggtggccttctcgcgggcctcttccagacgtccctccaatgatttgatgttgacgcgcgccgccacgtactcgtccatcgcatcctgtttcgtcctctggctgtcgcgcaccgccttgaggatgctgcgtttcatgtcacgcatggtgttctggttgttcgccacgacgatcttcctttcgctctggtttccgtcaagggcaagtctgccttcccgtcgcgcgtcccacggggcatggcgtctacacgccccatggcggaaggcggggcgtgtagacgccatgccccgtgtccggccgttttgcggccgagaatcggaagcgtcgttccaatcagatgaaaggaaaaccaatggaatcgtttctctctatgctcgccggctggttcatgggcctgtggacgtggctggtcgagctcaacgggatgctccaggtggtgctcgtgctgctgtgcgtggtcgcctcgggcgtgtgcgcgatcatcggcaaacgcatgggcagcccgatgatcgtggaatccggcggacagacctggagccgcacgctggtgacggccatcgcgtggatcgccggcgtcaccctcatgctgatcgcggtgcttgccatcgccgccgtgttcgcgccgctgctcggcttcgccgcctgattatggcggaaccttctacatccgggaccggctcggggagacatccccggccggtccctattcatgtcggaaaaacggaaaacgaaaaccagtgaaaggaaccacgcgaatgagactcgtcatcgcggaaaagaaatcggtcgccacggccatcgcgcaggcgttgtgcgccgcgcccgtccagaaggacggatgctatgagtgcggccagctgctcgtgacgtgggcgcagggccacctgatcgacctcgccatgccagaggactacaaggacagggattggggtaaatggagcctggacacgctgccggtggacccgtccggccattggcaatggaagatcagcaccgaacgcggcgccggctcccgctaccggcagatcgtgcagctgatccgccgcgcggacgtggattgcctcgtcaacgcctgtgaccccgaccgcgagggcgaggccatcttccgccgcatcgcggacatggaaggctcgcgcaagccggaactgcgcctgtgggtggcgagcctggaggcggaggccatccaggccgcgtggcgggcgatgaaaccggaatccgaataccgggggctcgcatggtcggcggagatcaggtcgaaggcggactggctgaccggcatgaacgcgagccgcgcgtactcgctgctctacaacgcacggttcagcgtgggccgcgtgcagacgccgacgctcgccatgatcgcggaacgcgaccggcagatacgaagccacaagccggtgccgttctggaccgtgatcgcggacatgggcggatggcggctctccagcgaacggatcaacagcaaggacgcggcgatgctgctgcgcggccaggtcgaacgcggccgcttccgcatcatgtccgtgagcaggaagcgggtgaatgaccggccgccccgcctgtatgacctgaccggcttgcagaaggacatgagccgcatgtacggcatgaccgccgcacgcacgctccaggcgttgcagcacctctacgaactcaaactcgccacctatccgcgcaccgacagccggtacatcacgcgcgacgacctcgaaacgttcacggcgctcctcgaatccggccgtctcgcccacgggttcgtcacccgcgagggcatacccggacacccgcgcccggagctggccgtcaacgacgcgaaggtggccggccataccgcgatcctgccgaccatgcaactggacgccgggaagctggaaggcctggacgatgacgaacgcaaggtgatgacgcgcatcgtgcgccgcatgtgggaggctgtgggcgacgatcatgtgcacatcgtcaccgaggtgaaggcacggctttccgacgacaccgatagggagttctccagccgttccgacgagaccgtgtccgcaggatggaaggcagtcgaaaccggccacgggcccgaaccggaagacgaggaaaccgcgaacccggcgggaggaaggaacgtgatcccgtcgaacctcatggaaggcggcgtcattcgtcctgtcgggaaggtcacggtcgaggaaggcgagacccggccgcccaaaccgttcaccgaggccacactgctggccgcgatggagcacgcgagccggtacgtggaggacaaaagcctcaaggcggcgctcgatgacgacgaatcacattccggcggcatcggcacgccagccacccgcgcggacaccatcgaaaagctcgtgcgctccaaactcgtggaacgcaagggccggcaattgcacgccaccacggaaggcgaacgcctcaccgacgtggtggagccacgcctgaaggacgtgctgctcaccgcgcggatggaacaggcgctctccgacgtggaacacggcaaacgggacccggccgacgtgatggacatgttccaccgggaggcattgcgaatccccgccgacgcgaccgcgaacctcaaggccgccgccgtcacgcaaaccacgaacaccgacgcgcaggattggggcgaatgcccgcgctgcggccagccggtgaggaaaaccggccggatgtggcaatgctccacgaacagaagcgagaagaccaaggacggcaagtggatcgccgtcgagggatgcggctggaagatgtacgcacgcctcgcgggcaagaccatcaccgaccagaccgcacgcaggctcctcgcgggacaagccgtcaccctgaagggcttcacatccaaatccgggaagaagttcgacgcggccatccgcatcgacaaggaacgcggcacggcgttcgatttcgaccgctgaccaaaacgccaaccatccgtgcccgacgcaccatgccgcgccgggcacggcaacgaccaaggagacgatgaaaccatgcgacgatacagccacgccttccgggtcctcatggaccgggagctgttcaatctgcttgccgaggcctccgccaagacgggcatacccaaatcccgtttcgtgagatacgccatccagccgttcagctacacggaactcgcccccggcaccaccgattggaacgacgtgtaccgcaccgaccccgaccccgaacatccgctgaagcggggacgccagctcaatgtcatgctcaccggcgacgaatacgagatgctgtgccgggccgcgttcaagctgggcatcgcgcgcagcgcctgggtgcgggaacgggtgtacgcgctcctctgccgctcctatgcggacgagctctccccgctcacggacgcgagcatccgcgacaacgcgacgatgctgctcaaggagctcaagacgaaggatgcgggaagatgacattccaaaaaaaggaagagcccattcccattcgtggaagaaggcatcaccccgaacgatcatccaccctcatgcgttttcctatgcgctcatatggatatgtccatggatacccacatggacacgtccatggacacccacatggatatgtccatggacatccacatggagatgcccatcaaatcgaaggtaagcaagctagacggttcatgtacatgaaccgaacgcagcacctccagcgcccttcggcgcaggagcaacaacccgagtgccgaaggccgatggaagaggaaaaagaataatgcgtaaaagaagcagcaaaggcggcggcgcgcagcgctccatccaagtgcatctcatggcgaacgaggaggaagccgcgatgatccgcgccgccgccaagaaaaggaaccagacggtatccctcaccatcatcgaagcggtgaagctgttggagggaagacttcaagtcgaggaggaggaacatgattcgcccaccgtccaggcgctcagggatatcgaataccagctgcgccgcatcggccgaaacgtcaaccagatcgcgcacaacgcgaacagggagatgaacgcgaccatcgaggacgaggcatcggcgtcctacgccgtccggcaatgccgggagctgatagaccatctcgatgccgtcatcgggcagtctgggagtgcctgatgacgcgaaccggtcagaggagggtcaggctttgcggacggtccgcttgcagtccttggatttcttcgatgaaccgggagaacgtcatggtttctccctggatcaggtcgtcataggattccttgactaccttgggcatgaccaagtggatgtgcagttcatcgagttgggcgagcttgggatgggtcacgtcgccgggagtcagggtgaacaggtgtttgtccctgatccggttggcttcgtcggcgacctggcggaaacgatccttgatggatgttttcgaggcgagcatacgcagctgttcctcggggaacgccggatcctcgtaggcggcttgcgaggggaacaggaaatcgggtttctttccgttttccgtcttggcctgggcctcgtattcgatgccgcgcgcgtcgaggatgtgggcgatgtggatttcgaggaccttgcctgcgcggctcatgcgccggttgcgcacggaggtgtagaacgaggtgaacgagtcaacgtcgatgacgccatccgatacgaatggcgcggcatcgtagtcgtgttggatgaccgcccgctcatagagtttgaacagcaggtagctgcggtcgtagtattcgatcaccacgtcgtcagggtcatcgtgcgtggggtccacgtccgtcaaggaggattgggagaagggcgcggcccgacaccccgcgagatcatcggctgcgtagacgccatgccccgtacgcgagcttgtgccagccgagtccgcccaccgtcgcggcgatcagggacatcggcgcacaggtccgtcgtatcggcgtcaatgtgaaccggatcgcgtacaacgtgaaccgcgagatgcacgccagcgaacgcgacgaggcaacggccgcgcgcacggtgcggcagcgccggaaacttataggccggctcgaagtcatcatcacgcaagccgaccgtaaataatcccgtggcgttcgggagcaaacttcccccggacgccacgaccgtcacctcagtaagccggagcctccatcgaggccgtcgaggggaacaccgggcacgatgcccatcccgttcacggcatcattcgtcttttccacgatcccagacgattgggccagagtcagcccgccgggcacatggccgacggcgttctgtgagagccaatcggagagccgggagtagtcgcccgtctcgtagtagcgcaggagcatggagacgaactgcgccttgtcttcgggagggatcgagaagacgccgatgccgtcgtgtatgagctggtggttggcaaccatcagcgcggtgcgcttgttgccgtccgaaaaccattgtccccgcgtgaccgcgccgaacagcagcatcgcagtgtcctccccttccgactcctccaggatgccgcgaaccctttcccgtgaggattcgacggcgggaatctccggcacccatcccgtgccgccgatcctcacgccgtattcacgcaagcggccggcgtcgcgcacgaggccttcgccgatgatgcggttgtattcgcggatgtactgccaatcgaccggatagtcgatgttctcgagcaggaatctccacgcgcgcttgatgttgttcaccgtgactatatcgtccacgctcataccctcgggcgcgcgcccgtcgaagatttcctgcgtgtcggggaaggtgacgccatcaacctcgatcttggcggtgcgccagatcgaatcgaccagcagccgcttcgccagttccacggccgtgcgcctatccgtcgtcgtatcgttcctcaccggttccatcaaagctccttatccgtttccgataattctatcgaagtggccgtgccggcaaaggacgcatatctctcatagacgccatgcgccgccgtgccgggcgcgcgggcggagaatcatcgtatgataccgaatatcgtcaggggttcggacccggccggcctggtgcgctacctgttcggcaagggacggcgcaatgaacacaccgaccagcatctcgtgtgcgcgagcggcgacatgtttccctcgtttgacatggatggcaagccggcggcgtcgtatgcggagataggccgcaggttcgaccgacgctaccgcgtcagggaacgcaaggacgatccgttcccgcccgacatgcgaggcaagaacaaccccgaacgagagcatggcaggaagcgcgtgtggcactgctcgctcgccatcaaggccggccagggcatactgaccgatcaggaatgggaggccgtcatccgcgattatctgacgcgcatgaacatcatcgacggcgacgacgatcagggcgtcacatggctcgcggtccgccacggactgtccgccaacggcaacgaccacgtgcacatcatggtgcagctcgccgccgacgacgggtggatcaacccgtaccacgaccggatcaacgcgcagagatcatgcaggcggatggagaaatcgcgccccgaactggtcgggctcgcacgctccgataccggcacgcgcgtcagctggcagtacgggcaatggcgtcaatgggccgaatggaaggcgcggaacgggtacggcgacgacgcgggatgggaggcgttggacggcaaagcgaggagccggctcgtcacggcggtcgccgcctccacgatgccgcgccagtatgtcggccggatcgtggaggcgtgcgccaaggcgtcgcgcagcgaggacgagttcatacgccgcgtgcgcagggaaggcttctccatcgaccccaggctgcgcaggggaaccgccaaagactcgttcaccgaccccggccaggtggtcggctaccggatcacgtggcatagcacggatgggtggatggaacggttcaacgccttcgagctcggcgacgacatgcgattgaaacgactgcgcgacggctgggcggacgatgccaggagccgcagcctcgccgtccgggaatggcgcgccgcgatggagaaccgcccgcccttcctcgatgacggacgcgaaagacacccggagaatctgtccacgcacgacatggaacgcctcgtatccgaagcgttcgccatcgccgccaacctcaacagcgcggcggacgacgacgaataccgggcagcgatgcgcgagggcctgcacacgttcgacatgctgcgcgaacgctacggaatcgcgccggaatacggtctatggagcatggtcgcctctgacgaggagagccggccccgccgttaggacgcttcccgggaaaagctcagatggtacggcccgaggagggaaaaccgagcgaatcaggcaaagccgatgctggatcgggagcgttcaccggctcgtctcccggcatgatcggctcgatggactcgttcgccttcatccagcacgcgttcaggcgatcggccatccgcgagtccagcccctcgcaggattcggatatgccggcgagaaccttccccgccatacgccgggccatatcggccaccctcgaaccatcgagaccgtgacgtgtcgccagatcctcccaatcctggggcgtggtgtgctccgcgaaggcgtgatccttgttcaacggcatggcgagttcccaattgaactcgggccaatacctggtggcgaccgcatcatactggggagacaggcgtatccccgatgcggggtcgaggatcagggaatagttcttcgcatgtgcgtcgctgttggcggacgacgtgttgaaggccagcctttcgagccaccggtaggacagggagcccgacgcgtcgatgcgttgcaggagttccaggcagtcgtcggccgacggatcgtatttgtcgcgggtcggcaatcccaacgcttgcaggaagtcctcttgccgcagtcggacgattcggccttcctccaggcgacggtcgaaccgttccacgatataggccgtcttgcgctgcgccgtgatctcgccgcgtgccggcgtgtcgatgccgcacagttccgacaatcgcatcgtcgccagttccaccttggtcgcctcgggaagatcatggggcttcggtttgacgatgtgggtggagggcagcatcatatccggccaataccacttgccgtccacgcgggacagtgtgaacttgccctgcgcccctcccaaggagaaccggcagtggctgtcctcgtcccaccagtagttcctggtccgctcgatgcggtcgatttcgttggctatctgggaatcggcgatcagacgaagcgtcggcgatgggattggaggttccggggagagggagaacaccagtccgccagtggcgtcaacccggtccagcagatcgaagacgccggccgaggaggcattcaggtgctcacgcatggcctggcggacgttgggattgtcgggcagtagattgtccaggaagttacgcggtgcctggtctctccatccgccggttctgggcaggctcagactgatcggcagaccctcgttcgcgtcgtacgcgaacgatatgcgctcctcgtcgtcttccgagaacacgcccacatgatgcccgttctcccaggcgtgcagttccctcacagcagtctccccgcgtaggcggacggcagcgtttcggtgcggatgtgcagcaggtcgaacatcctgtacacgtagcggatggaggtcagaccggtctccgcgagctcttcggcgcttgagaggggaaccccggctctcccggcgagttcggcggcatcgagacccatgacggacatgcgttcgcgcacgcaacggcggaccgacgtggtgtcggggaagaaccgcgccgggttctcctccttctcgtcgggaagacccttgtaggcggtcagggcgtcatatttcgacagatccaacgtcacgtgtgccatgctcgtcctttccggttccgaaagccgttgacaccatgatacggccatccgatgccggcgcaccccgctcgcctcatggcaaaggggtgcgccggccggcgtcagcgtgcgttgccgttggtctcgggttgcaggatctgcggcatcgggacgttggtccggtcgggtatcggctggtccgtggggttcatggacgattccatggcagggctgtattcgccgaacgggtcggggccggaccaggactcgggttcgttcaggtcgagtggcatttcctcgtatccgtcgggctccccggtggcgaggtcgccgcctcccgtggtctcgggctcgggttcgggtgccggtttgcgctcatcggcggcgggtttcgtatgagccttcacgggcgcggtggttccgatgatgggtgcggcgtccgcgttctcggtgcgttcgacctcgctgacggtgctgggctcgtctcccgtggccctgttgtccgcgtgcgaggattccggcaggccctggtccttgaggaagctgatccgggaggcggcgtcgtccacgccgttgaccggcgcgcacatcacggcgtcaacgatcctgtcgtggtcgtagcccgtccattggccggtgagccgcgagtccacgaagaacgtggcgtcgtcgccgtgcgcggcctggaacgcctgcgcgtcctccatccgtcgcaggtccacgggcacgccggccgtgttgaaggcgttcagggtggcctgcaacgcgggcgactggtcggtgtaggtgatgttcacgtggttggtcaattggtcggctgcggcgtcgatgtgcgtttccgggtggcgtttcgaccattcgtccttcagccgggccttcgcctcgatgatctgcctgcggaagccggggtcgttgccctccagttggtcggcgaccatccatccttgcaagagggacgagtcgcgcatcttcctccagccgtcgccgtcggcaagcacggtcgcgttcagggtggactcgaaccccttgttgaggcgttccctgttgtccatctcccattgttcgaggcggatggattgctgctgccgtctggtctgctcgtagcgttcgttctggacggcgcgttcggcgcgttccctgcggcgcgcgcggtcgccgctcagctcgttgtgcagggtgcgcagctgctgggcgacgctgttccagctctggaccatgatctggtcgaagccgtcctcgggatcagattgagccattgtttctcctccttgttggcgtgatggtggtttccttgtcgctcttgtcgttcgcggcggggaccgacaacgtttccaggatcggttcgcgccatgcacggttcgggcgttcgcagggcagcggttcgcccttcctggtgagctgctgcttgcagtcgaggctggcgacgatgccacggtccttgtcgaaaacgcggtcgagcatcgacgccgcctgtatgtagaagatcatcatctggccgggtgccttgcgcgagttctcataggcgcgccacatggcgtcgagcgggaacacgagcgccggatagcgccaccagtcgggcacccattgcatgttcacgcttgcgctctggtggtagcagaacacgttggctacgaacctttccacgaacgcggcgaggttcgggtagtaggtctcgctgcgccgcattcgcgctccgaactggcctgacacgtccctggcccgcgcgggatcgaggtcgccggattcgtcccggccgagatccgtcttcccttcctgcgcgggcggtatacgggtgtcggattcctccgcatcgtcctttggaggggtgtcgtcacggtccgttgcgtcttccggcggtttctcgtagccgttgccggtttccccggcatcggccggaatccccgatcggatgggttccgccgcgtgccggccggccggcatcacgggtgcggtcggcgtcggctcgccttggcccggtatggtttcctcttcgatctccttgtcctcggggatgtgcggcgcttcggggttaggcagtcccttgccgtagggcacgcccttctcctccaggatggcgcgggtgaacagttccagccatccgcagtccgatgacagcagggttctggctgcaccgatcgcgcgctcccattcctccccatcagggccggacgtggtgttcgaggtgtgttcgctcattatgcggcctttctctgctcgtctcgggctttcgccttggcttgcgccagggcgtcggcccattgcctgttgcccgtccatggcagggtcttgacgatctgcgctcgggattgggatgcgagcagcagcgcgcgtccgacgggccattcggtcaggtcggaaacgtcgaggatgttttccttctggatcgagttgttcacgctgcgccgtccggtgccgtcgatgttgacgctgccgcgcacgatctccctctggcccaccagctggctgatctcgccgaggaacttcgcgtccttgatgccgcccaggtacacggtgatgttcgcgttgttgaacagcgagccgaagttcgtctcgccgaacgcggccttgccctggtcggggttctgccagatcgtcatgatcggtatgcccgccgaaccgaaatacgagtacacgtccgccagttcgggccagcggcagatgttcgcggcctcgtccagcacgcagcacaacgggaccggcagacggcggttgttgtcggcgaactcggattgggcgcgttggaacgcggtgaacgcgaccaccgccgtcaggctggcggtcaacgcggtcgagggccggccctgcgccgaaagcaggtacagggtgtcctcgctcgtggcgaactcgtaggggtcgaacaggccgcgccgctcgtcgatgtttccttccgtatcacggtgcgggtcgatccagtcgatgatctcggggtccgcgaggaacgcgaccatggtctggaggctgccgaacacgccgctccgtgtttccggcgtcagcgcgatcacgctggacacgcgcgaggcgatgcccgcgtagcgcgggtattcgctcaggatgtcggccggcgacgtgtcgcgctcgttggagcaccatcgaaacacgtcggacacggaacggcctcccagatgcgcggcgaacaggtagtcggcgagctgctgggcggcggtgccggggaagaagtcgtcgccgccggtctgcggctggcccgacgcgtaacgccagcagtcggcgatgcgtttcgcgtcggcgatggactgcaccgacgcgatcaggtcccacacccacggcgcgctcttccggttcgggtccgcgatgcgttcggggtcgaacgtccatatccggccgttcggatggtcgagcctgcggatcggggcggtcacgtcgaggatgtcgcccttgttcgaggtcgcaaggcacgggcccggagccgagagcacggccgggatcgcgtagcacagggacttgccggaacgcgggcccgccagaacgatcgccatgtcctcccagctggtgtacatcgacgtgttgtccacgatgttgagccccagcggatagcccggcgacatgccctttcgccagtggtccgcttctatgagccttgacgccatggtttcggcgcgtttgcgcgtcaccttctccacggcctcgccgtggcccatcgccggcgcgtacacgtccacgcgggtgcgtgccttggcgccggtggcccatggcacggccttgctggcgatcagccacgcggccacgccgcacaccacggccagcacgacgagcacggccacggccagcgcccactggcctgcggtcagcgaccattggccggagaccaggtacaggagcgcgaagatctggaagggatgccccgcatgggagcacacgagggcgaacgtcgtgaggatcaggaacaccgcgacgatgatcgccagttcgatcttgcggctgggacggaccgtgccgcccagatccttcactcggttggattgcagtttcggatcgacgtcggccaagattcatttctcctttcaagcatcgacggcggaaccgatggaagcggtcccgccgtcgatgcgccagggcttgcgtcatggctagcgggcgttgcccgtcgtgaaatcggatggggtggaaaggaaatccggtgccgcagggtccgccggagcgggagccgtgcccggtgtcggatagcccgacagcgggtcgaagggctcgccgttgaaagtgcggggaacgccgtcgccaacgtattcgccgcgcgaggcgtcaacctggtccgtccatggatccgttcgcccggcatcggccacggcaccggcctgttccttgttctggagtttgcgttcgcgggcgagctggatgcgcctggacacgatggaatcgatctgcatggaatcgccgatcacgaccgggcgcgcgtatgccttgccgtccttctggctgatgaaggcgtcgggatcgcccatgcggccggtcgccaccacggcgtcgccctggcggaaatccatgccgtgcaggagctcggcggcccggccccagaatttcacggtggttctcaccgggccgagcggattgtccgtatagctgccgtccttctgacggactcgcgggcggtcctcatacacggtggcgcgcaggtacgccgagctcgtggtaccgtccgcgtcggctttcgccggccagtaatcggggttcgcggcgaggagaccgcgaaccacttgcattgactgtggcatgatgatggtcctttcattcggggaataccagcgccttcgatggcggcggcgactcccatcatccggccggaccggtggcctcgcggggcacggcgtctacgccacccgtcagcggcccagatgcccgccgttctcccacacgttcgtcgcctccatgacgggatcggtttccggcagacggtcgagcacgcttgacgcgaaccgatccgaggcgtcgtagccgatggcctgttcggcgagttcccgcgcctgctcgccgtcgcccatggcgaggccgagcatggccttcaggccgatgatccggtagcaggcgtccgtcggcgcgttcgcctccaacgggccgaggatccccatcgccatgccgatgcgcgccggatcgggcgtggtgccgttgtcgatcagccgggaaaacagcaggtcggtgttcaccatgccgtccggcgtattgatgcgttcgcgcaatgccggaagggacaggggagcgttctcggccagtatgtcgctggcgatcatcatgcatgtcgattcgggcgcgaactgcatcgtcacgcccaatacggcgagccggttcgcgtcggacgaccattcgcctgcggagcgctgttcggccatgagcttcgaccagtcgtaggctgccgcgttgcgccaggtggtgcgcacatgttccgagaatccgtcgtaggtcatgcccgagtccaaatattcgcgtgtggctgcggtgatcagctcgtccaacggcggttcgtccgtatcggcggccgtggcctcggcctccacgatgaacgggatgcggggcccttcggagaccaagccgtccgtttcttccggctgccccccgttgatgcggtccgcttccatgcggtccacttcgccggcgaaccattcggagcccgcgaaacaggtgccgtccatcgaggagagcaccggctggagaatggatgccagctcgtcgtacacggcatcgggattccctaggtcttcgacggtttccgtcatctcgttgtattcgatgatgcggttcgccagccgcacggcaccgtcatcgggtcgaacgtcgtcatacgattcgccccaatgctcgatccatccgatcatcgtctcccgtgtgatccgctcttcggcaccggtgttctccaaaggcatgttcggctccttgacaatcctcggcggcaacccggcgttcccgccatgaccccgatcatcagtccaaggccatggcggcgtggggcacggcgtctacagggttcttataggtttcgtccgtgcggccggtcaggtcgtccacgaggccgaggagttccggttcgggccagatggagttggcgaaaaggtagtcgtccgtcagggaccggtccttgaatatggttcgcgcgtcctcccggatcgaggccagcgagccgccggcgatcatgtcggcgagcccctgtgtgcagtacaggtcgtatggcgtatatcctttggcgttccaatcgatgtgatgggtgatcgaatactcgcattcgttccagtgctccacccatggaagggcgtggtcaccttcacgggtgacggccgagtagcggaaccagccctcgggaacctgtatggcatcgtcgccatacgggtccgtcagggaatcgaggtagccggcgacgatggattcgccggcatggaattccgcgtaccatgcgaggtcgggattgcgcagcgcggcgtgcagcgagtcgagcagtgcggcgtcgttcaccgtggtcctttcaccggttttccgtttccggcaggaagccggtgtcgtcgtatattctgaacgtttcgacggcgtgcgcgacccgcgccctcgattcgccgtaggttgccgaatcgaccgtctcacgccatacgggttcacgggtttccgtgttgccgtatggttcggcgggggttatcgacatttcgaggtcccatgaggatgcgccgtgctcggcggggcggaagtcgagcgtgctgcggttgcccgtcagccgcagcagccgggattgctcgccgagccggtcggagagtgatgcggagcgtgccacggtgcggatcatgcgtttcatgccggtggcgaggcggtctgtcatcgcggggttcccttctaggcgtgccatttgaggttcgtgtcgttgaacccgcttttttcgagcgggcacatctccacgttgatggggattccgggcagtccgcccaatttgatcaggaaacggcccagacccttgtgcgaggcatcggagccgaagttgaccggggtggcccaatcctccagcatgtcctcctcgcgccgggatacgggcagtccgcattcgccgcgcaggtatcggtccacctcgatgcggctcaaagcgcccagcaccttgatctcgctgcgttccacgaagccgcgcgccttggtgttctgcgccggggtctccatgcacatgaggtccttgaacgtgtgcgtgatcatgatctggcctacgccccactgcctgttcagacgggtgagcaggtcgagcttttcgaccatgagggggctggcgcgcaaagcgcggtgcatctcgtccatgatgatcacgtggttgcgccggggctgcaatccctcctcggcgagcacgtcggcggcgttcttcgcggcgaacgcgctcgtccacgtggtcgccagcacggcggcaaccacatcgtcgcccgactgggccagggcgctgatgtcgaagtccacgggcctggacaggtcgatgcgcgcggtggtctggtcgccgaacagacggccgaacttcgtcatgcggttcgagaacccgtgcaggtcggccagaaggccgcgaacctgcgccctgtagagctcgtcgttttccgggtcgtcccagaccgccgccgtgcgcacctcgccgggcccctccctcagcaggtctcgcaggtccgcgatgacgggaggctgcggatcgccgccatgccggtcgtggagcacgcgcacggcgacggaaaggatgtcggattcgcgtgcggtcacgcccctggcaccggcatcggtgtcgttctcgcggccggtgcgcatgatcgtcaaaagcacctccatgagcgcggcgcgcgtgtcgttgtagtagtccgtgaggtccttgcgcgcctcgccttccagttgttgcagcgcgtggtggaggtcgccggggtccagggggttgaccacgccgatgcccgctcccagccggatgacctggccgccgagcatgttgaccagcgaagcgtagtcgggcttcaggtcgccggggatgatcgcgttcatgcccagggcgctcagtcccagcacctcgcggcgcacgaacgtgctcttgccgatggccggcaggccgagaaggaacatgctcggctgtttgatgatgccggccttgaaccagctgatcgggtcgcagcacacgccggcacccgtcatcaggctccgcccgaccggcaccccctcggccggcagggccatgtcggtgccgaacggccagaatccgccgcacacctggttcgacgtgccgaagaactcgtcgatcgtgggcatcagggccgcgtagccgccgccgcgcgatcttcttccacgccacggcaccgggggcacgggctcgtccggtttggccttcaacggtgtgagcagcattgattccatgcgagccacggggtccgtggccgtggcgctcggcatggttcccttccgtttcgacggcttccatggcatcggcatctcgtgtcctccgttcaggacaggagccggccgagggggccggctggagtgtatgatctgacgttcaatccaaggggcaggcttgcggcgaatcccgtgtcctgtgccccgtagcaggggcgcaggtcgatcttcgcgccgcctgcggcctgttccacggcgcgtgacgcggcttcgagccgttggctttcctgttcgcccctggacacggtgacggtgacgagcatcccgaagaacaccatgaccgcgccctggttcgttgcgacggcctggcggttggccttgccgatctggctcatggacctcaccgtggcccgtttctcctggctgacctggttcgcggccttctgcctgttctgctcggccatgaacatcgtcttgtcgggcggcagcatccggtagagcacggtcactcgcttgcggccgcagtccgccaacggggaaagcagccgggtgagcgtgtcggcggtcacgttgcttttcggcggatccaccatctcccatgtgcggctcaaaccggaatcatgcgcgtaatggctccagccggcctcgtgcatgagcggtccgcaatcctcccaggcgatgtacggcggctcgtcggattcctcgatcgtctcctgagcggccggatcgtaggcgacgcggaccatgcgcgtgatctcctccatgcccagggccctcgcggcaccgcctcccgcctgcgctatctgctcgcggatcgagggcagcagcaggcttatgcgacgcgcggcctccccggcctccaggtatttgccatcacggtcggcgtagcggaaagtcaaggtgagcgtcacatcgttggaagcgccgccggccgcgtactggtccatgatctgcgccatggcgcgcgcggccagctcgggagcgtccctgacgatgcgtctgctcaacgtgcggcggaacctcacgccggaatcgggtgccgtgtccacggtcacggccaattgggtgacaccggcctcggaggcgagcgattccatgagcccggcccacgaggccacgtacgaatcctccacgtcgtcgtcggcgaggctcgcgccctgcggctggcatgacaggagcagcgagtattcgccggtgtgcgaatgccgcaccaggcagaactcgccgcccagcccgtccagggcggaggtcaggcccacccgtgagaggatgcccggaagcatggccttgccgccgtcgatcggcgcgagcaggccggaacgatacaggttagcgccggaacgctgcgcggccatccacgtgcgtttctccacggtgcgatccaccatgttgcggtgctcgcggtcgcggatcgccaacacgaggatgacgcccatgccgaccacgaggatcgcgatggccgcgaccacgctcgccatgctgaccagcagcgtgcaggtcagcactcccatgcccgctatcgtcagcgggatgccgatgttgcggatgccgcccggcatcggccgcatccaatcgccgtatgtcgtgttcgacgccatggttatccgaatctccttaacaaaacgtatgcgtcagaatgtcttgcccttgcgagcggtcgagcggtcggcaccgtccggggcgccctcgcgggcgaacccgccggcgtcgccgttcgccccctgcggcctgttgccgcctgacgggtcgggtgatgcgccatcgggtgccggtggaaccgggctccccacaccattgccgttcgctcccagcggcttgccgtcgctagccttgcggttcgctccctgcggcttgtcgccggtgttctgcggttcgtcgcccgtgggattgccgtccagcggcttggcttgcttgccgccgccgttcgccccctgcggctttccgccgtttcggccgagcccggaaagcagtccggccaggccgcgaccggcaccgggtttggcaccgtccggtgacgcttcgccgcgtccgtcgccgccgcctttcctgccgcccttgcctcctgcggccttgcgcacgccggcaccggccaaagcgactcccatgccgagtatggagggcaggattccgccgccgccaccgccgaccgaggattgcactgcgggcacgatcacgcggatcatggcgggaaggaggatgatgacgctcagggtgagcatcaacgttatggcctggctgtcgtcgccggggccggccgtgaccatgatcgccgagccggtcgccatgaccagtgcggcgacgggcttgtaggccaggaacgcggccagccagccgattgtcttggcgaaagcctgcttgcccgattccatccagctcatcgcggcccacatgggtgccacgcccacgaggatcggcagcatcccggcgcggaagtaggcgaatatcttgctgatcagcccgcagatccacatcacgacggtgagcacgatggcgacgggcgcgcccaagttgaagaacgagctcgcggccaggcttttcgattcccatgcgtcgctcatcatgccggacgcggatctgagcacggcggcggtccacgtgtcgaacgtggcctggaacgtgttgaccagtccggcaaggcacacggcgctcaggatcgcccacatgaaggccttgcccaatgggataaggtcgcggccctcctgctgggtgacgagcttccagccggcggcgatcacgccgcacacggccgcgatgatcaggaacgggtcaacctgcatacggatgtagtccgacaggaagaacgtggtgccgccgcccggcgtccaggacggcaggcccggattgccgccggacgagcgggagaagaacgtgagcgcgatgctcgcgcacgaggagccgagcagcacgccgagcagtatccagccgatgcggtcgagcagacggccctcgccgccctggccgatgttccacacgatgcgcgcgctcagcacgatcaggctgatcgcggcggcagcaatgagcacgccctgcgcgatgcgcaggtaccggttcaccggcgtgaaccatgaatcgtagtccggcgtggcgttcgcctgcaacgttgataccgtgtcgttcgcggcgaccagcgtgttgcggctggtggacagccattcgatcgtggaatccgactgcacctggtacatgttccacagggtcttctccagccaggagagcttgcgctgcttctggcacgaggagtccttgtactcccatttgccctcgtcgggcgactcctcctggtacgtgttctccaacgcatcgcattgcaggttcggtgcggcccggaactggacgcgcgcatacttcttgagctccttgtcggtcggattcgcggacaccattccggcacgcacccagccggcccggtacttgtcgatgacccattggatctggctggggccgatcaggtcgccgagcctgccttcgggtatcttcatcacgtaggtggtctgggtgtcgctgatctgcttgtctccgaacgtgagctccttgctgaacgatccgaagtcgggtccgccgcaggcggcgaggcccatgaggcaggcgagggcgagcagcagcgcgcacaggcgctgccgtatgcgtcgaatcccttccatggcttttctcagcagcttgcggtgacggacaggccgagtgcggcgaggatggcgacagcgcccgccccgaggaagatgccgatcacccagttgacgagcttgtcgaacgtgtcgtcgcggtccggcacgccgtcgccctgctggcgcaggatgtgcacgccgatgcgcaccagcgcgaccacgccgatcaccaggctcagcgccttcacccagcccagggcggtggataccggccccgagaatcccggaggcaggcacggggtcgggtcggaaagggcctcggcgaggatcatgtatgtttcatgcagcattgggtcgttcctttcgtgttaggttcatgcaccatcgtcagccgacatgggccgtggcgcggggcatggcgtctacgtccctgacaagccgtgagtacgcggccggataacgccggggaaacccgtcgagctcaagccctttgatatggggcagccgccacacgcggacggcggatgacagttggatgcgcgccgccaccaaaggccggggcacgcggggcgcggggtcggtgatggccgcgcccaacaggatcgatgcgccgaacagtccggccgactggtcggcgagcagcgcgcgcaacgattcgagacctctcccggttcccatggcgcacaggatgacgcgcgacggcatggagggatccgggctgaccggcagcgcgcggccggcgtcggcgaaccgttccggatccgaatggcggatcgtggtgcatccggcaccgccgtgcgcgcccaccagccacacgcggtcggtgacgggtgccgtgaacgacgggatcaacgtggtcagttgtggcatggtgttggtcctttcataggctcgggtcggtgccgggcagttgcgaggggtccgggttcgcgggcaccgaccagcccggaggcgcggaaccaccggtcgagccggcggaaccgccggaggaatggtatccgccgcccgtcgggccggaacccgagcccgaagcggagccggagggcatgtacgagtactgttgcggtgccggcgtgctctgctcctgcgcctgcgccgcagccgctgcggcctcctcctgcgctttcctttcctcgtcggccttgttcttcgcgtcgatggaggcgttcaccttgtccatggcgtcggtgatggccttctcgtcgcgcttgtcgattgaggcgcgcagcagggcgcgagaatattcgtcctgcaccttgccttcggaggaggaatacaatcgttcgccctgttcgaccgtatgggccagccgtgaggcgaacaccgcctccaccgctgtcctcacccgtgcgagccgtttggcgttccgcttctccgtggatcgcagcgtgctcgtggtggcctgcgccgtttccgtgccgcctgcgcatgtggggatccgttcgcctgcggcgtatcgttcggacaggtcgttgagggtttccagggtttccgggtcggcgagcttgtcggctgtgaccgctttcgcctgtgcgagccggtcgccgtcgagatattcagccagcttccgttcggctttcttcgccgctgcgcgcgcggcggcgcagtccgccgtcgcctgttccagctcgcgcgcggccgtggcggattcatgcgattcccacgcggacatgccggcgaccgtgacgaaggccgcgagcaggatgccgcccgcggtcgtggccatgcgcctccattcgcgcacgggcatggcggcatcctgttcgccgaccggcgtgaggtcgatcgtgtcggcgagatcggccggctccacggcaccgccgacgtgctgcggttccgatgccggagcaccggccgggatatcattccccaccggattcgaggccgatggcagcgggccgatctcccacggatcgacggccgtgttcgcccggccttcgcttccggcgtcgtccacgcatcgcgcatccggctccgcttcgggctcgggtccgggttcggccggtggccggcgttccggttcctgtgccggttcgatggcgacggcggtgccggcggcgaccatggggccgatctcccatgggtccgtgccggaggtgttcatcggttcgggaagaggcgctggcggaggctcgggcggtccggcgcggtggcggccatgccgtcggcggcgtcggcctgccgttcgcgcagctgccgctgttccatgacccatgcgggatgctggccgtgctcgtgcgcgtccatgaggcagcgcgtgacctcgccctcgggcgaaaccgccgcgagccgtcccagatggccggtgaacgcggcttcgggatcgccctgcatgaagctcatgtacgcggccgcctcaagcatgccctcccttcgcgcggaatccgggatgctgttggacagccgccacagcagtgcgggtatgtcctggtggaactcgctgttggctatctcgcgcacgttgtagtcggcctggtaccacggtttgacctggcccgaggcgaacaggggtatggcgcgcggatcatgctcggcgaccatgaggaaacgggcgcgctccaggcccggcgatatcagcttcgcgcacacggcgtcgcgcagccccgtgtcgccggacagcgacgccagcagccccgccgtggcatggtccttttccgcgtccgcgccgatgcggtattgtccggcgcgcagcgagtcgagaaaatcgaatacggccaatgcggtttgcctgtcagccatgtgcaacctccagaggaatgatgatggtgcgaacaatgtcagagtcgatgatgcgccgggtcgcgggccgctgcggggcgcaccgtctacaggccccatcgggagcacggctccacggctccacgggtccacggttccacgggttcacgggttccgggcatgggaaaggccctccgccgggagaggctggcgaagggcctgggggttcgcacgccgtccggggcacgggattcggaaggtatgcccctttccggcatgtgaagtcgatggagggcgtcccggccgtcatcggacgacgaggccggaacgccacggggtcacttgcccgcgttcacggccgtgtggcggccggaaccctgtgcgcggtggcgcttgcggaacacgagcagggagccgccggcgagcagcaccgccagggcgccgccggcaaggccgagcacggccgtgccggtggaggccaacggcttggcacggtatccgttccagtcgtcggtgttgctggtggcctgggtgtcggcgcacagctgcttgccgtcgatctcggtcacgtcgccggtggaatattccggatcggtgtcttcgccgccgtcggtcttgtcgttgaacgggtcgccgttggacggcgcgcattccacgagcggggtgccggtgacgatggcgcggtccgtgtgggtgtcgccttccctgacgcccttgagcgtgccggtcacgctgaccgactcgcccggcttgagcaccagggtgtcccagttgtcgggataggcgagcgaatccatgtccacgtgcgcgtcgccgacgatggtggagtcggcgaggtccaggtcgcttgccttgaaccatgcgccgtcaccggtggccggatcggtcttggaggtgttcgtgatgatgaacgtgatgccgatgctgtcggcgtccatcttcagcgcctgcttcgggtcgtcgcggtccgcctgctcctggccttcctgcttgagggtcggggcatcgaccttctccaggtggatgctcggggtcatgtccggggtcttggtgacgaccttgttggattcgcgcggctggccgttgatggtctcggtccacgtgttgggcacctcgtcggccacggcgatgcgcttgcactggaggtagagcacccagccggcctcgtgctcgttgtcggcgctcaccaggtcgaggtaggcctgggtcgcgttgaccgtgaccttgccgttgccgtcggcgtccacggcgaacaggttgccgccgaacttcgaggagtcgaagccgctgcccgcgatcttctcgcccctggccgcgagcacctggccgtccctgtacaaatcacgcgaggcgtagacggcccagttgcccaggtactggtcgtactcggtggccagctggtccgtgccgccccagtccgtgacggtctggtaggcgcggtccgggggcaggatgctggaatccagtcggtagaggaacgtgtggttcagatacacgctcttgccgtcgatgctgtcgccgccgacctgcacggtcacgtccttcttcgggttgatctccttcagcgggttggtgacggtgttggtcttgtcgcgcttgtcgttcgtgacctgcgtggcggtgttctccaccgtgtggccgtccttgaccttggtgacggtcatcggcatgaccacctggtaggtgtggcccagcagcgactggtcgatgctcgggtccttcagcgggtcgtaatccttgtcggacttctcgctgtacgccttcaggtcgccgggctgcgggtcgccgggcacggtctcgccggtcgcggggatctgggtgtccacggttttggcgaaggcgtagagcaccccgtccttgtcctggatgttgaactcgccggtgcggtccctgccggtctcgtcaaggatctccacgtgcttcgcgtcgagggtcaggtactcctggtcgtagtcgtccgtcatgcccaagcgccataccttgtaggcggtgtcggtgagcctggaggcgtcgatgttgacgcggtagtacaccttgtcgcccagcagcgcggtcttgccgtcgatgttgatggtcgggtccttctgcgtgtcctgcttggagggcttgatcgtaggcggctcgttctcgaccttgttggacggggtgacgccgttgttgacggtcagcgcggccttgttgccgacggtcttgtcggtcggcgcgtcctcgttcaccttggcctcgaagcgcagcagcacgcgcgggttggagccggccttccagttggcggcaacccagtccctggcgaacgtggcctcgaacgagtggttggcttcgtcccactgcaccttgtaggcgctcttcgggatgatgccgccggttcccaggtcggtgatctccagggtctgcttgttcgcggtggtgtactcggaataggtgtcgctcagcttgatggcggtcaccgaatatgcctggtccgcagggatccgcgggtccacgcgcacggtgtattccacggtctggccggggaacacggtcttggtgtcgatgctggactggtcgccgccctgggaggattcggcgatgacctgcttgtggatcgggggcacggtcacgcagatcttcggcgtgttggtgtccaccgtgctgccgccgaccgtctggccgcccttgttgtcgaggtcgtcgcccttcgggtccacgcacgtgttgagctcgtcgccctcggacttgccgtaggattcgagcagcttcacggtgtcgaagttcacgtcgaacgggatcacgacgctgatctgcttcgcggtcttcagatccttctgcgcggcctcgtaggagtccttcgcgctgaccgtgaccttggtgccctcggcggtgatgtcgaactggtcggtcacgtccctgccggtcttgttcaggtcgttgacgctggcgttggcctcgtcggcggtgtcctgctcgtagaccttgatgttggaggtgtccttcaggtcgaggatgctatcgacgttggcgaagtcgtcggtccacgcgatctcgggcacgcggcccaatccggtgggcagggtgccggagatgaccgccgccacctcgtcgccgagacggtagtacttgtcgtcgccgcccaccttgtcgctcttggtcggatcgacggtcagctgccacttgccgccgaccttcatggcccacgccttgttggggttgggcgtccacacgaacaccggcggctcgttggtcggtcgggtctcgttgttccacttctcgtacgccttgttggtcagctggatcttcttgccctcggtggcaccctttttgatggtgcccgtcaggtagaacctgaccttgctcgcgctgttcctgaacatcgtcttcgcgatgtaggcggacttcgcggtggcggtcgcggtcccggccttccggtcgatcgcgatggtgaagttcgcggtctcgtccttgccgtcgacgaacaccttgccggacttccagtcgatccactggttcgaaccggtcagatcatcggtgatggaataggatgccagcgggttgagcaggtgcgcggggatgctgccgttgacgaccacgcccacctggtctcccacgaggaacgtcttctgatcgacgccctgctggttggtccatttcctgtcctcggccacgagagcgccggactcgtccagcacccacaccttgtccggggtcggcgtgaccttgcccacgctgtcgctgttgccggtctggcagtcggccaggctgccggtgccgttgtctccgttccagcacgccacggaaccgtcgttgatctcgtagtcgccgccggtgggcttggccgactgtggcacgttcagcgtgtagaggccggaatgcggggcggtggcgtgcgccttgaccacgcgcttgccatcgatggaatcgtcgatggaaatgtccgccggcacgatgttgccgttcgcgtcggtcacggtcaccttgctcacgtcgtcctgctcggtgccgccgatcaccacgtccctggtgtcgatcgtgtcgtagatccagaacttgccggaggcgttggaatgcgccttgatgtgcgccgtgtacagcgagccggacgcgatggagtcgttgccgtcccgcaccgtgtcgccggccccgttggtcagccatttctcgggcggggtggtggtcttctcgccggactccttgccgtcgttctctcccttgtgggagaccgcctcggccatgtcgccctgcttcgccacgtcaacgtcccaccagcgcttgcccgcaggccacgactcccacgaggcgtccatgtccttgaaggacgcgctcactgtggcgctgcccttgttggatgcggtgaactgcttcgccaccgtcttctcggtgccgtcaatgccacgccagtgcagggtcgcggtgccgttcacgttctcggtcttcgacccgtcgctggacagggtgatcacatccgaggcgtccttggtgtcgcccgactggcccgacatctccgcagcctgcgtgctgatgcccagatgatatgagggcggcgcgggctggtacttgtcgagcacgatgaccacgatcgacggcttcgaggaagcccccacattacgacgcatgatcgcatccacgctgttcgacggatcatccgagaaaacagcagatgtgcggtagctctgagtacccgcatagttatatgtgtttggcgcgacgtaggtgttccagttgtcataccagccgccgggcaaagagggcgaatagtaaccggtgccgtcgtagatgaagctgcggcctgagatgtagggcaccgcgccgacggcgaccactcggcagtcaccatcgccctcgccgggatgacgctgccggaaaccggtctcgcattccgtgcgggcctggtccaatgcggcctgcgccttcgtgacgccaccgccctgcaacgcgacgccggcattgttcatggcggcgcgcaccgaatcaagactcgtggccggaccccatgcgcccgatgcgtcgtccttgtattgccagaactgcaacacgtccatgtttccgcccgcgccgggctggttgccgccgccaccgcccgcgaacgcggtcgatgcgacgacgccgccggcaccaagcgtggcgatcgcagccaccgccgcgacaccggccttcatcatcttcctgccaaagttcataaatgaacctccgttaaccttgtctgttcatcccctcccctcaaactttccggtcatggccccgccgccttttttcaaggggtggcggggcttccgaccgcaggaataacgggaggtagccgccggttggcccggcagccaccaacaagcctcacagacgacacgccgaaccacggagcatggcgtctacaaaaatccggaagtatttcccggcaacacgggcacacgggagtgcggggacacgggttcacggggaaatgggtttcctttgcgaaatccatggaaaaggcccgtaccggtttcccgatacgagccataatcagccaatcgtcaatcagtgatggtagtagccatcatccttgccggtgcagctattgccgcagccgtaagagccgttgaggttcggcttcggggcggagccgccggccgggccggagccggacgtggagccggagccggtgccgcccgatgtggtgccacggtatgtgttggagccggaagcggagccttccgtgcgcctgtacgcgccgccggagtaggaggagccgccgctgtaggcggattgggcctgcgcctgagcctgggcggccgctgcggcggcttgcgcatccgcgtccgtctttgcctggacgctcgcggccacgccattgatggcatcctccaccgtcttgcgcgccccgtcgatcttcgccggatcgttcccgtccttcagcccgttcgccgcgtcgatggcgttcgacaatgcgtcgcgggtggcgttgtccgcgaccttgccgtccgaatccgcgagcagcctcgacgcctcgtccagcttcgccgtcagattcgttttcgcggtttccagcctcttcgctgccttggattcggtgacggccctcaccgccttcgacaggctcttctcgtgggtcccgtaccagtcggcctgttcattgagcttcacggtggcggcatccagtccttgcgcgtcttcggccacgcagccctcgtattcgggcgccatggccttgagctccttgcccaaggattcgacggtcttcgagtcctcgacctgttcggccttgacggcggcggcatcggcggcatcgccgttgagcagcgcgttgtactcgttggcattgctgcgcacggtgtcggcggcggcggcgcacgcctcccttgcctcggcgagcttcgcgccgctgtaagcgttccagccgacgatgccggccgcgaccagaatcaccgcgcagacggccgcgatcaggggcggcatcatgccacgtttaagctgattgtcttccacgtttttcccgttctcctgaatgccactcacaaacagggtatccgacatttaagaaaacagtagaaaggcagggcgggaaatccgctcccctgcccggcctctctactgtcctaccgtggccttacttcctgtgtcgcgcggtctcggtttggtttccgcgacggcggaacagcatcaatcccactcccaagagcgtgaacgcggccaacgccacggtcggcgtggatacgccggtcttggcgagttggcgaatcatcttcacgatggccggggtcgccggtgggatgtacgagttggtgaactcgggtcgggttccggtggttgtgaccacgccgggagtcgtggacggcccgtccccgacggcatccccatcggtcttgtcggtcttgtcggtcggcgtggcgagcatggcgctggaatccttcgccgtatcgtccgtcgggtcgtattcgactttggcggtcaggttgccttgcaggtcgtcgcccacggtgacggtcacgtggtgttccgtcctgtcgtaggtgacgttcttctcgccggtgttcctttcccgaatcacgtaccggtgttcgccgcaatcgtcgatgccgttgttgtcacgaccgtaggtgagcggcttgaaccggatgtcgccgtccttgtcgttcctcgcgctgtcgatgaccttgccgtccttgtccacgagttcgaactcgaattcgtcggccttcagcccgcgtccggtcaggttcttcctggccgcgagttcgaccatgacgttccccggctggtacgtgttgcggaagaggatgccatcctcgccgccctcgccgttggagtaggagacggcggcgacgagccgatgggtcttcgcgtcctcggtgacggtgacggtgacggtgtggacggtcctgtcgtaggtgacgccgcccagattgccgtcctgttcggtcacggtgtacgtgtacacgccggcccggtcgaacgtgagcttgtcgaattcgagggttccttccccttcgcggacgttcgccttgtcggattgcgcgtcgcgtggaacgcgggcgaaccgtttggtctggaggaggttgccgtcggaatccttcaattcggcggcgaactcgccatcgttcagatcacgtccggtcaggtgcttgtccgccttcacggtcacgtcaacgggtgtcggcgtgtacgtgttgtcgaatcggacgtccgtggcctgacggtcggcggtggccgagagcatgccgccttggtcggtgacggtgacggtcacgtcataggcttgggtggaatacccgatggtcgggtcacgtccggcctgttcggtgacggtgtacacgtaggttccgggcttgtcgtagtccattcgtccgaacgtgaaaccggtgccggtgttggtgacggtcttcacgccgtccttcgacccctcgggcatcggcgcgccgtcatgcgaggtgagtgcgaacgtgaactcgccatcctgtgggatgcggttggtcgccgtatccgcgttgatgatggtcttcacgccgccaagcgtgcagccgacgcctttcggattgtacgtgttgtcgaatcggatgccgttcgcggtcttgccgtccgaacgggtgatggtcttatcgacgaccttcaaccgtccggcatggccgacgtccttgaccgtgtaggtgatggtggtgacggtgccgtccttggtgacgccggggacggtgacgtcccgttccgaaacggtgtacacgtaggttccgggcaacgggaacgacagttggtcgaacctgatgttgccccgggcgtcgttggtcttcgtctggtcggcttcggccgtgacgccgtcgggcgcggtcacgcggtggagcgtgaacgtgaaatcatcgcccttgagcttatagtggttgccttcggacgcggagacggccttcactgcggtcggcgtgtccgtggcgggctgcgcccggtacgtgttcgtgaattcggggatggcggtcccgccgtcgtatttcacgtcggcgagcagccgtccctccccatcgtcggtgacggtgaccctcacgtggtgtttcgtggtgtcgtacgtgatgccgcccctgtcgccgggggtttcccggatggtgtagtcgtacgttcccggccgcgtgtaggagatggcgtcgaacaggacgtcgcctcgctggtcgttggtcttcgccgtgccgacctggccgcctgtcttgtcctcgacgcacttgaactcgtattgtccggcttgcagttggatgcctgtatggtcggggtcgttgagggtcttgtgcgcacggaattgcacgctgaccggcttcgcctgatacgtgttcgtgaacgtagtcggataggccgcgttcgttctggtttgggctttcaactgtccggtcaaatcgtcggtgacggtgatttgccacattcccatgtgggaatcgtagttgacgccgcccgccgactggcggatttcacgcaccgtataggtgaacgtcttggacttgttgcctttcagctggctggcggtgaacgtcaacggctggaagcggacgtcaccgttccggtcggcgttgacggtctgcacgggcacgccgaccgcccgctcgttgtcgaacagttggaattggaagtcggtgagcttcgcgtggctggcgtccgcgttgtcgaacgtcttgcgcgccgtcaggcttacggtcacgtccttcggcgcgtacgtgttcgtgaactggatggcgtcggattggacgccgtcgcacgtcgtgttggcggtgatgcgacgggtgaacgtggtcaaatcgtcctggacggtgacggtcaggacccacgtgcgctcgtcgtaggtgactcccgcattgtctcccttgcgttccttgacctgataccggtagacgccgtccgtggggaacgcgttggagttgattttgacggtctgcgtcctgttgtcggcgaacgtgatggtggagggcaccgcgttcgcgggcgcgccgtccaacgcggtgatgtccgcgacgtacctgtccttgtcggtccaagcgccgttcggacgaccgtccagcactttgaccgctttgaacgtggccggaacggcgggcatgagcgtgccgctcatgccgtggtcctcgttcgggtcctcgtacacggcggacgtcatctcgtccaacgcggggaacggtttcagcgtgatgacgccggcgaccatgttgccgtgcgaatcgtcctctcggtcgctgtcggagtcggtcgcctcgctggcgtccttcgcgttcttgacggtgacgttctgcccgtgccaagcggtgccggttttcggcgtgaacctgagcttgaacccggaacctgccggaatggaaccgatttcgtagtggccgttcctgtcggttgtggcggtgcagggtttgccgctcacactggtgactgtcctgccgttgccatccacgagggtgacggtcacgtccgcgagaagcctgtccgaatcctgtcggatgccgtcatgattggtgtcgaaccatgcgacgccgttgaccttgcgttccacgacctgcgtgaccgcgtccaccgtgttgtcgccgtccgtccaacggttcacgtacgagtccgccgccttgttgcttgtaggcttgatgctcaggctgaagtcatagcgggcgttggcgggcaggcttggcgaggtgaacgcccatgccaccggcttgctgtagccgtcggggatggtcaccttgcctgtggtcgcattcaccgtggcttcggtccattgtgtgacctgttcgcgggttatcttcgtcgcgtccacgttgcgccatttcgggtcggtcgtgaagtagactttgacgccgttcatgcttgcgcccgcacctgccttgacggtgagtccggccagagtgtagtcgccgtgatagttggactggttcaagcccttgtaaggcatgacgtccaccgcatacgggtcgattttctcatccttggagaagttacccagcatgttcctgaatcccaacgggcgttcgatgtcgctcagcagcgggtcggcacgggtcgccagcgaggacgcgcgcgtgcgggacacgcgaaccgtcgcgtcggcggtctgcgcttttgaggataaggggggagccatgttgcgtttcgactggatggtcgcatggttcgtgaacgaatcgttgttcctcacgtcatggtcggggtcggacgcgtccccgatggtggtggaatagtggatgacggtctgcgtgccggagtcggcgcgcgccccgttcaccctgatggtcatggtggtggtgccgtccttgttcacgacgatcgtcggcgtgacgggggtgccgccggggaccgtgcctttgtcgggcgtatgctgcgtgtactggccgccgaccgtcatggaaccgtccacgtaggtcaggcccttgggcagcgtgtcggtgatgatgtagtcggtcgtgtattgtccgccgtccgtggtcgtggacgtgtcggcggtggcggtgagcttccagtccaccgtgcgctgttccttgtccaaatcgtagacggttttgacgttgcctgcctcgttggtctgcgcgacctgtttggcgatgtgcggtgtttcgccggctatgtacaggctgtcgcctttcagggtgtcggcggtgtcgccgccctgatagacgccgttgtcgtcgaacgtggcgggacggtacgtgtcgccgctgtaggtcaggtcgggtttcacgctgttcgcgtattcgggcagtcgggtggcgagactgtcggaccattgctgccattgcgtgttggatgcgtccgcgttcaggttcgcggtccgggcgaggctgttgcgcgtccagtaggcggtttcggcgacgatgggtgtgaccgtgccgattctcgcggtgtcgaggatgcgggcgggcagggagacgagcggcgtgaatgttcggttgaagctcgtgccggtcgggtccaccgtgttgtggtcttcgaacagcatgccgactatcgtgccatgccgtttcgcctcgttgagggtcggatagtagtcgagtccgctgattttcgtgtcgcgttgctccctgtagtccttccagttggtgccgtcctttttgacggcgtaccagtaggggattgcgttcccccgtttggctgccctcgcgccccaagtccaaacgtacatggggatggttggctgactgtcgggcgtatcgtccaccggttcgatggtgttcgggtcgaatttgaccaggcccatgcccatcacttcggcgtcgccttcggagttgatgatgatgttgtggcctatttggaggcgtagtttcgacccctgtatgagactgtcggacccgttgccgtagtcgggttgcgtccagtcgccgctcgtgcccgcatcgttccatgacttttcgttgctccagtgcgtgtatcggatgcgcgtactgtacgtgcccgatatgcggacggtcgtggccgaacccgcatggtcgtcaccggtggaggcctggttcgaattgtcttccgccgtgtcgagacggtctccgctgacgccggtggccgtcaatcccatgtcgtccatggtaatgttggccgtctggtccacgttcccgtaatattgcgcgacggtccggccgtcacggctggtgggcgtgatgaactgcaatacgtccgtgtggatggctccgacctgcatggtggagcagtccgacgtcatgtaatccgtgctgcatttattatgtgtgccgttcagtttattgtggatggggaagacggacgtgtcgtagccgtcgaacgagacggtcacgaccgtgccctgcccgccggtcgtggtcgtgattgtcgtgttgccacgcgccactttgtcatatccgtccgcacggtcggcgacgcccggagcctgataccgtaggtcgcccatccatgcgaacgtccgtccatacttcgaatcttcgttgtcgatatgcccgtaatcgtagagcaacggctgccaacggcgttccatcggatgcttcgtcccggtcttcgtatcatccgaatactggttggacaagcgaagcctataggtgatcctgccggacggagcctccaaacccttcaaccccttcgtccggtcgggccaacgcatctccgtgaccaatgcgatgcccaaacccaagccggtcaccttgccctccgtcctgttgggcgcgttcgccgcacccgaggagaagtcgaacacgcccctgtccacgttgccgtagttgaccatgcgcacgttcaggttgagtttcgcgctgacggtcacgtcggcgggcgtgtcctcggcccgtttgtgcgtgcccgtgttcgtcgggttcgaggcgtcccatgcgggccacgccttgacggtcggatggaaccggtagccgtggggcgcgcccttgacggcgaccgacaggccgatggaaccggtgccggggttcacggtcggcgactggctggtcggctccaacagacggtagcaggtgtacacctgcgtgacggtcccgtcgatggtttccgtggtgagtttcggctcgtagccgggcgtatggtccacccagcccatcttctccgcgtcgaacgtgaccttatcggccggatacggcagttcgaaccggaagccgacgcgcgtgcgccgatagtagtccatggtcgagtcgggggtgagcgtgtactcgtagtcgtaggtcaccgtatcgtaggagcggacgatgtcgttgttctcgtccttgtcgtcgccgcgttcattgtccgcgtcgaacggcgcggtgccggtgatgcggtcggtgagcctgagcctgctcacggcggcgctgtccgtgtcgagcatgtcgtggacggtcacgtccggcgcggcctgacccgcgtccgcctgcggagcggattgcgcgggcgcaccggtgtcggattgtttgtccgcaccggttccggcctcgtcgccggaaccggcgtcgggtttcgtcgcggcctcgtcgccgcctgtggtcgtcttcacgtcaggttcggcttggattcgcgtggacgtgcccatggtcgtatcgtccgcatacgcggcggaaacggccgacgcgcctgaaccgaacagcatcgcggacgcgagtatgagcgcggcgacctttctcagaccgggtttcatcgtcttcctgccaaagttcaaatgaacctccgttaaccttgtctgttcatcccctcccctcaaactttccggtcatggccccgccgccttttttcaaggggtggcggggcttccgaccgcaggaataacgggaggtagccgccggttggcccggcagccaccaacaagcctcacagacgacacgccgaaccacggagcatggcgtctacaaaaatccggaagtatttcccggcaacacgggcacacgggaatgcggggacacgggttcacggggaaatgggtttcctttgcgaaatccatggaaaaggcccgtaccggtttcccgatacgagccataatcagccaatcgtcaatcagtgatgaatcaaaccatcactggacggcggagggcagctattgccgcacccgtggcctccactgaggttcggctttggggcggagccggacgtggagccggagccggtgccgcccgatgtggtgccacggtatgtgttggagccggaagcggagccttccgtgcgcctgtacgcgccaccggagtaggaggagccgccgctgtaggcggatcgggcctgcgcctgagcctgggcggccgctgcggcggcttgcgcatccgcgtccgtctttgcctggacgctcgcggccacgccattgatggcatcctccaccgtcttgcgcgccccgtcgatcttcgccggatcgttcccgtccttcagcccgttcgccgcgtcgatggcgttcgacaatgcgtcgcgggtggcgttgtccgcgaccttgccgtccgaatccgcgagcagcctcgacgcctcgtccagcttcgccgtcagattcgttttcgcggtttccagcctcttcgctgccttggattcggcgacggccctcaccgccttcgacaggctcttctcgtgggtcccgtaccagtcggcctgttcattgagcttcacggtggcggcatccagtccttgcgcgtcttcggccacgcagccctcgtattcgggcgccatggccttgagctccttgcccaaggattcgacggtcttcgagtcctcgacctgttcggccttgacggcggcggcatcggcggcatcgccgttgagcagcgcgttgtattcgttggcattgttgcgcacggtgtcggcggcggcggcgcacgtttccttcgcctgcgcgagcttcgcgccgctgtacgtgttccagccgatgatgccggccacgaccagcacgaccgcgcagatggcggcgatcaggggcagcagccacttcggccgtttcctttcacccgtgcttggctccgtgatgttcttggcgggtgtttctacggtttcgaggatttccatcttgtcgttctcgttttcggggttcattgtcgttctccttgttttgattggattgtggcccgcaccggtttcccggtgcgggccacaaacagccaatcatcaatcagtgctgaataggcggcaacgatgcacaaccatctacgcatgtgccgatgccgtgtccgccgttgaggtttggtcttgtggtggaggcagagccgccggtcgaaccggaaccggagttcgaaccggatccgcccgatgtggtgcctcggtatgcgttggagccacctgtgcctgtgcgcctgtacgtgttgccggagtacgacgagccgccgctgtaggtggattgggcttgcgcctgagccgcagcggcagcggcagctgcggcggcggcttgcgcatccgcgtccgtcttggcctggacgctcgcgttcacgccgttgatggcatcctccagcgttttgtgcgccttgtcgattttcgtggcgtcgttcgcgtccttgagcttgttcgccgcgtcaatcgcattggtcagggtctcgcgggtggcgttgtcttgcaccttgccatccgaatccgtgagcagtttcgatgcctcgtccagcttcgccttgaggttcgccttcgcgtcatccagcctcttcgagtccttggattcggtgacggccttcaccgccttcgataggctcttctcgtgggccttgtaccagtcggcctgttcgcccagcttcacggtggcggcatccagtccttgcgcgttttcggccacgcagccctcgtattcgggtgccgaggccttgagctccttgcccaaggattcgacggtcttcgagtccttgacctgttcggccttgatggcggcggcatcggcggcatcgccgttgagcagcgcgttgtattcgttggcattgttgcgcacgccgtcggcggcggtggcgcacgcctccttcgcttccgcgagcttcgcgccacggtacatgttccagccgacgactcccgccacgaccagcacaaccgcgcagacgacggcgatcaggggcagcagccacttcggccgcctccttccgtccacgccgccacgggcctccgcaacgtttgcggcagcggtttcgacgggttcgagggcttccgttttgtcgatctcgttctcggggttcattgtcgttctccttgttttgattgtcgtctcaatttcgtctctcatcgcagcgtctcccgcgcgatgtcgagcagccgcccgtcacggccgggttgggcgtccgctgtgtgggagagccagtcctgatcgacgtcgagggtcaggtcatcgaaggcctgttgcccgtcgtcgcggcccagcaggccgcgtagcctgaacgtctcgttcatgtgctgtccgtcccattcgatgcgccgggcgtacagcaggaaatccagagtaaggaaccccggcccggccttgtccacctgcacgtaccgggagcgcgccggcgcgagcctcacctgcggcacgcctttcagccgttcgtgcaacggactgcccggcacgatgtagcgtttgaccaggttctgtccgccggccgcgaagaacagcatctgcggcagattgccgtaggtcgcgtcgtaatagcgccatccctggtcgtcccgccatctgcgaagcatgtcacgggcggcccccggccccagatggatgccggagaaccgttcccacgccagcgtcacccggtcgaactcgccgcgcatgagaccatacagggcccgcccggtcggatccttcgaatgacgtctcgctcgggtgtccgtccgatggttcggatccgcatacgggcagtgcaggtaggcgtcctcgtcgtagcggcacaggcccggcacgtcgccccggtggtgccgcccgtagggccggcgcgcacggctttcctcctgccggcggaacagaccgacgatctggatgggattgtcgcacagcgggcacaccgcgtagtaggacggccccgtgtcgccgtcacgacgccacggggccacgccgccggtgcaccccatgtatgactcctggctgatcacgatgctttccgcccttcccggccatgccttgaacacatccatagtcggcccccctcgccgcgcatcgtcgtcattgatacctcctgttgatattaacccaccaatccgccggcagctcgggcaccgcgccctcgcgttcggcgaacgcgaggcacgcgagcaccgtgcgcaatcccaacgggaactcccgccgtccctgacgcatcaggaacgtccagtcctccacgcagtcctcgcaatccgaatgatccatgatcccgcgacgggccagcacggcccgctcctcgatgtcatccgtcatcatccactccttcttccgtcttgcttcgcctcggcccttgcatccgccgcgtcgaggggcgggcagtcatgttcgatccatgccgtgagcatgtcgcggatggtggtgccgcgtcgcacggcctcggccttgaaccgtttcttgagctcggggtcgagctccaccgtgatcttgggcagcttgaccggtttcttgtagtctgtgagcgtcgatgccagcatgttcctggtggtcatcggcttgttgatctccatgatgtcgttcctttccgtgttcccgtatccacgggtttgcgtggatacgggattgcgggttttcggttttgcgggtgtcatgcggcgaatgcgtcgctgagttccctggcgatcagtccgtagcccgaagcggacgggaaccgcccctcgtccgatgcgaggcgcatggcctccttgtacgggatggtctcttggcatcgggccagtccgttctcggccaggaactcctcggcgtgcctgaggctgcgcgtgccgtagcgggtctgggtcaacaacaccgaggagggcttgttgatctgccggatggtctccagcatgcgttccaggtcgatgggtccggtggtggtgacgagcagcacgaggtcggccgcgtccaccgccgcctccaccagatcggtctgcaagggaggtgtgtcgatcagcacccattcctcctcggcgggtgcggcgacggtgaaacggttgaccacctccaccgggaacggcaggggccggccggccgattcggccttgtgcgcccacagggtcgccgcgccggacgggtcggcgtcacgtaccgtcaccgtgcggccgaggcgagtgagcgcttcggcggtgccgatggcgctggtggtctttcccaccccgcccttgaggttgacgaaggccacggttttcgtgttcgtgttcattttgcattgttcctttcactggttttccggcttcccgtgtccacgggtggccggtttcctgtaaatacgggtttccgtgatgattcggcctcatgggccggatcggtggtttcggttggtcggaatgttggtttattggtttgccgttttgctttcgggagtgggaatgcgcccctcggcgaggtgccgtttggcggcgttgatgaccgtgccggtcatgtcgggggatgcgtcccagcggcggcgttcgccgttcctggcggtggcctcgaacctgacggccacgtactgttcccgacagtcgccggcatcgatggtgatggtggcgggcatggccgttatcacgccgccaagcgcatacacctccaatcgtttgatggtcctggccgttccgtccttggagggcgacggcgcgaactcgcggccgaacctggcctccgggatcgcgccgcgcgccgcgttctcgatcacgttcgccagctttgcggacagcgtcttcatcgttcgcctccttcgtttgccgcgtcgatgaccgccaccaccacgtgacgttcccagtcctcgcgtgatgcaaaggcttcgccgcagttgcacacgtactcgccgtgtcccttggccgtgtcgaagaagcaggagggcgcgcagtccgcggtgtggaaggcaaattcggcacgggcccgttccagtcccgcgaccgtctccttttcgacggcggcgggatcgacgcccttcagcgcctggctgagattgcggcgcgcctggccggcggtcatgcctgtgtaggacagcacgtatggctcggggctgaagcaggtgactttcagactgcattcatgcaatgcttccacgctcatggttttttcctttcaatggttttccggcttcccgtgtccacgggtgcacggttccacggtttgccgcgtatacgggtttccgtagatggcttggccttgcggggccggattggattgttttcagaagagggtgtcctgcaagggcggggtgtgtgtggcggcggccggggccttcgccttgccggtcgagcgtgtggtggcgcgccatcgttgctggcgtgcggtccgctgctcggtactgcgtcgtctgcattcgcgttcgcgtgccgccgccacgatttccgggttcgcgcggatgaagcgtgcgagccgctgttcggcggtcgggtcgttcgggtcgaaccggaatccggcctcctgagcgattttcaggacctgacggcgggccctcaacggcagtccgccgtagatgccgtactggtcctggaccatgatgccgaacgcgaggcattcggccctgaccgggcaggcctcgcagatccgcaccgccgcacgccgcagttcgtattgggttcgctggttgggcaggtcgtcgggcccccacatgcggtccgaccacgagtcggggaaatccgcgcattcgcctttcaggaacatgccggcacctccttcggcccacggccgccgatgaagccgaaacggacggatgccggcccggtctcggccggcttccgctgcccgaagccgtcgtccttctccctggattccgcgtccaggaaggcttggcccgctcgcaatgcctccagcacggcattgcgttcgccttcggcatcgttcgcggggacgcgcttcaacagccgacgcaaggtgcgcggtgcctcgaacccgtcattgcccgcatcgaagccgtaagggtcgagcagtttccacacgcgccggtccaggttgtcggggatgccgtagttcggcaccttcggcatggatgccgcgctcggcggttgcgccggttcgcccttgtcggcgatgacgccgtgttcggcgagcaggcgacgcccgtgggggtcgtcggcaatctggaggcatacctggtcccagtgccgtgcgagggagcgggggccggtgagcgtgcgacgccagaaaccgtcatacggtttgccggaagcgtcgcccttgtcggtcttggaaggcggcagcgacgcccattcggccacggccagcaccagtggcatgccgtggcgggcgatcagccgtcgggcggcgtcgagttcgcgtttgccgggccgggccaacggttcgggaaccggcatcggcggcaaggctcgcagcccgtccgccatcgtgcggcacaccgcctccgcgtcggaaccggccccggcggattcactgcttgggggttcggctccggcggcgtcggcccatgaaccgtcctcgcggattccgtcatcgtccggggaggtctctccgcttgcggggagatgccccgtaggggcagaggggttattacgtactagggacgtactgtagctcaccaggtgagctgggggtggggtcacagctgtgaaccgtggttcacccgtgagctggggttttcccgtgtccccgtcgccataaccacggtccacatgtgagccggggtttcccttcgccctgttttccgtggaaggccgtccgcctcgggtcgagtcgatgtcgttcgagtcgaagaagtcggggtcgagctccagacggttccccaggcacagatcccacacgacgggccggtgccactcgctgaaatgcccggcctggcgttggtcgccgcgacggatcagcccgttcgcttccagccatgacaggtggcgtttgaccgtgctcacgctgcacttgcaccacgcggccagcttcctgtgcgtcggatgcgcgttgcgcccctcgtcgtcggccacgttcgccagacacatcagcacgcgagcggcaccgttgtgcctggcgtccacgggcgcgaacctgagcgcccaatcgaccgcgttcacgctcatgcggcaccccctcggcgggagtcttgcagacgtgcgcgcagcatgggcacgcgcggcacgggaacgtcgagcatcatcgacaggtagaagtcgtggctgccgtccgacgggcaggccgccaacaggcccgaaacggacccacgggccgggaagccgccatgacgcgcggcacgctcatgcgtttcatgcgctctcatggctctcctcactcacggaaccggccgactcctcacgccaacgggcctcaagcatgtcgcggcgcgtggccgcgcggcacagggcgaacgtcagcagataggacgcggcgagaatgatgacgacggcgatcacgagtatgaggtgcatcatcggcccgcccccattgatcgcgcgagggaggccagcagacggaccgcgagaagcacgatgccgactgccagacgcaggaacggcagcagcaggccgaaacaggccactgcgagcaccacgaacagcaggatcaccaattccaccactcatcacccccgctcaccgaaggatgcctgagcatcgagaacaccgcgtcatcgccgctgagggcctccacgtcgcgcatcaacgcgtcgatctcgtcggacaccatgcccgcaccggcctcgtagccgcgattgaacacgcaatccgacggaccgccatggatcaggccacggttcaccgtccgcgcgggcgacgaagcgttccgcacgtcacgaagcgcgtcacgccggccgatcagataggcgaccgccatgacctccctcacggtcatcgacgcatccacggacagggacaacagggacatatagtcccggaaattcgagcgctcctcgttatcgagggaacgcgcgccaacggtcatggtcattgcctcacctccacgtgaagggaccagaaagcgaaatcccaggcatcacgcgagttacggtcgcaccagcaacccacacaagccaggccgcaggccaccggcaccaaagcgaatcccgacagaagcagattcctcgcggcaagcagaatcgccagaaaaaccacgcacgacaacgcggccagcatccaagcggcaagacccgccagctcgtagcgccgggcagaacgccgccaatacagggattcggaaaatgtagacgccatgcaccgcgaaccattcacgggggcgttaccatcaaaatcagaagtcggcacagcgacttcggttacactagacatttgtgcagcctccataatctaaaaggcaatgcgaacgattcaaaagtttggcgactcgggaatcgttcaacattggatgtgttgcatacgcccggtttcgatgctccaaatcgagactgggcttttcctttatcagacagacacctcctcgtgatcacgaacagattcagcaaacttggcttcatagggaaccaagtcctgaacaaaatctgacgagagaccgtaaacatctcgtagacggcgacaatcgtcgaattgccagcaggtcttcaggttgaccttctggctgatgcttggctgagattgattcagctgcttagcgagctgggcatacgatatgccatgctctctgagccatcgcttcatattcgacatattagcttccttcaactgcttagcttatctaagcagaaccatactacttagcttgactaagcgcaaacgaagccctatactgcgtgttaagactattatccttagcaatttaggggagaatattatgacgatggttgaccccgtactcgtcgccagccagtttgacgaggatgaagcagaggcaattctgcgatacaacatccgcaagtatttaaaggcaaatcgagtatcccagaactcccttatggatgtgctcaacatcacatcaggagctgtctctcagctcatgacaggccgcacgcatttcaaatatggacaagttgcagcaattgccaactatttgcatgtgtctatggacgatctttcaaacgcgacacagttcaatgaggatagaaacttccttgagcgcatgaagaaagaatactcaggcagcaaaaaggcctcgaatcaatccgaggccttcaatgagctcctgcggctgggcttgaaccagcgaccgtccgattaacagtcggatgctctgccaactgagctacgcaggaataagttgttttgtgcttaagatttctctcgcgcacaagtcatatagtttacacgtacctgaggaaaatacaacttacatgcgtgtcatgcatgtcgcgcatgattcgttatcacatcgagaccttggtcaggggcatggcggagtcgattgggaagtcgggggcgctgggtgccacgccggcttcgaccaggttcacgccgagcatggcgaccatggcaccgttgtcggtgcagagcttgatctgagggatgcggacgtcgacaccgtaattctcgccgaattcgagtagtttggcgcgcagctgcgagttggcggagaagccgccgcccacgatcagcgtgttggaatcatactgccggcagccgcgcatggccttgtgagccagcacagtggccacggaatcggctagggaggcgcacacgtcatccactggaatctcatggccggcggcctgttcgctttccacccagcgggcgacagcggttttgacgccggaaaagctgaaatcgtatgggtgtgcagcaccggccttgccctgggtcaagcccatcgggaccttaatggcatgcgggtcgccgttctggccgtgacggtcgatgtgcgggccgcccggataggggaagccgagcagacgggcaactttgtcgaagcactcccctgccgcgtcgtccagcgtggtgcccaccacgtcgatcttgcgcggcaggtcctccacgtgcagcaacgaggtgtggccgccggaaacgatcagagccagcgtgtctttggggaacgggccgaactgcagctgggtgacggcaatgtggccgatcacgtggttaatgccgtagatcggcttgttcgccgcccacgctagcgccttggcgccggagacgcccacggccaggcagccggccagtccggggccggcggacacggcgatagcatccacgtcagccaacgtcatattcgcgtcggcgagcgccttggacacgcacggaacgaaggcctcggcgtgcgcgcgggaggcgatttcgggaatcacgccgccgtaccgcgcgtgttcctccatggaggaggccaccacattggagagcagttcgcggccgcgtacgatggcggctgcggtttcgtcgcaggtggattcaatgcccagtacaaccggttcgctcatcgtgcttctccgttcgtagtagtgttctcgttcaatgtgttcgtatcgttcgactcatgttccgtgcccgcgccgcccacacccgatgtcgttcgtgttgataccgtctgcgccggtgcaaagcccacgatcctcggcttcaggtccaggctcatggtgtacgcgtcaatgccttcgggctgatagtaccgtttgcgcaatcccataagttcgaaaccgaagcgttggtacaaagccagcgcgggctcgttgtccacgcgcacttcgagcagcatgcgcgcggcgccctgccgtttcgccttgtcaatcagcgtcttgagcaacgcggcggcgatgccttgccgttggtgcgccttgcccacaccaatggtcatgagttccgcgtcctcgccgtcgtaccagaagccggcgtagccgcgaacaacaatctgttccgtctcgccaaacacgtcgagcagatatgtgcgggtgggtgcatccagttcctcgcgcaccatgttctcgttccacgcgccacggccgaatagttcgccttccaactgtgcgatggagtgaaccgcaagatcacgacttacggcagtgatgtcaacaatcatcgaatcaacccgtctcacgccttatcggcgccggcatggccgagcacgtgcttcagcgggttcggcacttcggcgtccggccggcgcaggtacaacggttcgaccggcacgtccctgtcgccgcgcagttcgcggctcagtgcggtggccgcaaaggcggcaagcccggctttcccggcatccaatatagatccgtccgccacggagcccagcgcgcgcaatccctgccagacggacgcgtatttagccgcgccgtggccggccacgtctaccacgtagctgacgccgtcacgttcgccgtattccgcgagcgccgcgttcacccgttcgacgatatgctccggatagtcgatgtccatctcgatccagcgtcgttccgcggcctcctcgtccggccggctgatgctgccgtggttgagcgagaagtacagctgcttgcggcgcgcatcgttgacgcacagcgtaacatggcggtcgagctcgtgctccttggcctcggcgtccgagtcgtcaccatccgactgatgcgagcccaagcgcggcacgtccgccagaaaatcgatgccgtcgaacaattcgtcgccatccaatacgaagctcatcatctcgccttgcgggtcgagcacgttctgtccgacgagcttggccccggtggcgaaggccagtgccttggcggccacgatgccagcgcgcaggccggtgaacggcgccgggccgatgcccacgacgatctcctcgatatcggtgggggtcaggccggcttcttcgaccgcacgcgcgatattgacctgcagcttctccacatgggtgcgcgaatcggtctccacaatgggctctcgacctacaatgccgaccgtcgaaccgaatgaggtgtcaatcaccagcgtgcaacccatgaatcctcctagtcataaacctctagagagtgtacatcgaggagtctatgggcggattatcgtaagtcgaacgactcccatcgcgcgcccaccggtacgaacgtgaccgtacgaacaccatcgctggtcagttcgccattcatgtcatccgacacgaaggcagcttggtcgagcggacggtcgatatgaacttccaatcgttccggagccagtgcggtggccatctgctcgccccactccatgagcaccaccgtgttctcgccagggtcttcaagctcctcatcaagacccagagactcaagctcgtcaagcaaccgagcgacggcatcctgaccgggggcatatgccgaaccacccaaacgataggcatccacatgcaccagatgtgcgggagttccgtccgcgaatcgtccatcaagctcgcgggcgatggtaaacgtcggcgagacaataggctcggtaatgccgagtccagcgccgaatccttgcgcaaatgtggttttgcctgcaccaagaggtccggaaagcaacaacacgtcgccgccgtgcaccaatccggcgatacgcctgccaagatcttgcatggcttcgctagtggaagcctcaatcacgtgttcgatcatcaactgacctaccgccctttatgactgatgtcttcgatgcaacgctccagcgcatacatcgggtcgccaccgtttgtcttactctgctcatcggcccaggcgagcatgcggatgcagtgcgcaagaccgggagaagtccacccgccgagttggcgcatcgcgtttttgagcacccagggattggttttcgcctcggcctgcgaaatcgtgccggcacgtacggccgatgccttggcgatggttctgagcttcatagccaatgcaccaatcaatgcaatggggtcggttccttgttccacggccgcacgcatcataacgatggcttcagcggtacggccttcaacggctttgtccgccacggcaaagccagtgacctgcgggttggcggtgagatactgattggcacggtcgagtccaatgggattgtcctcaaaatcaaaacacaattgctcgcacatggccgcaagctcgccggttttgccgccaagcacggacacaagctgttgggccgccatcggctccaccctgcgcccgcgtttctcgaattcgccgagcacgaaattcaactgcgcatccggcttcttcaagtcgggcacgtccaccttgcgagcgccggccttggtcagctgatcgatgatcttgcgccccttgacgccgccttcatgctgacaaatgacgatgctggagccgttcggatctttggccgcctgtttggtgtaggagaccagggtttcggcgaacttttcatcggcgttttgcagattgatgattttcactacggcggtgtcggaaagcagtgaaggactgacagcctcatcgaaggcgtattggtcggccgaggtggcgtcgagttcgatgagttcggcatcagggcgggcctgcaatgcctgtgagcacagttccttggttcgcatgccgttaaggtacgagtcgcctccgggcaccacggtcaccggtgcattcgctgctgttttcgccatgcccccatctcgccacacaggttggacaatgtatgccaatacggtctgttcctcgacctcatacgcgggcatcttctttcacgaagaatcaccggacaagagccgccgagattcctcgatccacaaagtcaggcgcacccgccataccgaaccgaagcgcataccgggaagaccggcttccggctgccgtacacgcttcacttgacgagtaaccagcaccaacaaggctcctatgcccagctccgccagcagtatcagcgcagcgccgaccacgccatctttccacggcagtgtggctatctcgttgcttcccagccacatcgccacacgttccatcaccaatgtgccccatgacgacacccatgcgaacacgcccgccaaccacggcatgcaccatgcgagagccaacgacatcaagccggtgatggtggacagccccacgaatggcgctaccagtaggttcgccggtacggacaataacggcaattccggttccatcagcacctgaatcggcagagtgaacagctgtgcagcgatggtcatcgccatcatctccgcaagactatgcggcaatacatgccccagtacgcggctcaaccgcccggcaaacagcactatgcccagcactgccgccgaagacagggcaaagccgtaactggtcgacatacccggactcaccaccaacaccccaaccaccgtccagcacagggcgctcaacgcttgggatcgccgacccatcgcatgcgatgcggcacccatcatgcccatgatgagtgcacgggtgaccgaatcaccggggaacatcgccgcagccaacagcacgtacatgcttgcgatcatcactgcggtcagccgccggtccatcagcagccacctgccaagccgacggaccagtcccgccagcagtacaaaatggccgccggatacggccatcaaatgcatgattcccgatttgcggaaccggtcttcaagtatgttcgcatacgtggcgtgaatcggcatggattgcgaatccgtgccgacataatcctgcccaagtacacccatcgtcaatcccggcaccagcacacgaccctgatcgggcaattgctcgataaccatgaaaaacgcctgctgcatgcgggatatcaacgcataatgtagcggcggatctctcacttgagccaacggctggttgccatcaaccagcagccataatggcatgcggccatacctcgcctgctgcaaagtgcccgccagacggtacgccgcgcccctatgcatgcgtgcgcaatacgggtcatcggcatacacgcgcgctttggcgaccgagcccctatccgttccctcaatcacgatgacgctgaatcgcacatccacctgacagtcatagccgcgctgatccgaagcgaccacaggtgccgtcactgtagccgtaatcgcactctgcacgctggattgccgagcttgggtcattgccgaatcgtgccagacgatggtgtctgccgcaatcgtcgtcatgctgccgacgcacgccgccgcaatacagacagccagtacaccgggccagcgcatgcgtaggtgatgggccagcaatactaccaatatcaacaccagacacgccatgccgcccgggagcaaacgctcccaaccgatgccatccgagggcaacgcatcagcctcgcgctccgaccaccaggcaaacgcgctatgcgagcccagactcgccgcccacatggtcaaggcgaccggcagcatgcgccaatcgcggctcccctgctcccgcaacgcccaatccatgctcatctgactgtcacctgccctcgtatcttctccaaggttttcgagccaatgcccttgacgccgagcagttgatcaaccgaggcgtatcggccgattgtcttgcgataatcgatgatgcgctgagcggtcaccgggccaacacccgtaatggtttgcaattccgccagaccggcggtgttgatgtcaacaagcccatcatcaacggttacggcactgttctcatccgtctgtgtttccgggagttgctcaggatccggctcgacatcggtcatctcgtccgaatcggaggaagactgcggcctctgctgcgttgcattggcattgttaggggtttcgacggcaacattcgatagcgcggccaaatgcattgattgttgaatcaacagagtcagactgatgcccagcgcggcaaccaataacagcacaacggccagggcctgatggacattgaacgtcagccgcggcttgtcccgtaaacgatggactgcaccatcggcagcatccgtagaacgtacgcctatcaaatcggatagtgattgtcggccatttttggatcgagcggacgagcggctcgagacagccgctgccggaggaatatcaatagattttgcgcgactcgactgaggtggtggcttgggaggctcagccgccgctcggccgctggccccaaagcttgaccgaggaacaggcatggcttcttccgccttgcacaggtctcgcagtcggcggttggcatcgatggtcttgcggttacgaaaaacgcccatgaatccacgctgatggattcatgggcgtttgtctagctgaaatggggtatgtggttctagcttatgaagttatccacaatgagcgtcactcagcgggaacgatggagacgatcttgggggccttgacaatcaccttacgcggctccttgccgccaagacggtcggcgacggcggcacgcgcctgcttctcgagatcggccgggtcgatgtcgaccggcacttcgagcttggcgcgtaccttgcccttgatctgcaccacggcggtcacggtgtcgtgacccacgtagcgctcatcagccaccggccacggctcggcggacagggaatcggcgtggccgagcttgttccacatttcctcgcagatgtgcggggcgatcggagcgagcatcaggatcagcggctcgacggcggcacgcggcacggccttcaagccggtcaggtggttgttgagcacaatcagcttggcgatggcggtgttcgggcgcatgccctccatttccgcggtcacttcggcgattgtgttgttgagtagcttcagggtcttctcgtccggggtttcctcggacacgtgcacctcaccggtggtctcgttcaccacgttgcgccacagacgctgcaggaagcgcatgccgccgaccacgttgcgcgtgttccacgggcgggactcgtccagcgggcccatgctcatctcgtacaggcggaaggtgtcggcgccatagttctcgtacatgtagtccggggtcacgatgttcttcagggacttgcccatcttaccgaactcgcggttggcgtgttcgccgttccatgtgaacgtcggttctccggaagcgtccggctcgccttccacgacctcgtcggccggcacatactggccacggtcatcggtgtaggcgtaggcctgaatcatgccctggttgaacagcttgtggaacggttcggccgaatccacgtaaccgaggtcgaagagcaccttgtgccagaagcgggagtagagcaagtggagcacagcgtgctcgacgccgccgatgtacagatccacgccgccttcgtcacccgaatacttgttgtggttcggacccatccagtagtcgaactcgtccttctccaccatgtgcttggtgtcggtcgggtcgatgtagcgcatgtagtaccagcaggagccggcccagttcggcatggtgttggtgtcgcggtagtaggtcttgacgccatcgcccaagtcaagttcgaccttgacccagtcctcgttgcggctcagcggagcctccgggttggattcggcgtccatcggatcgaaggtgcgcggctcatagtcaggcacgtcgggcaggttgatcggcagcgcggaatccggcagcagatgcggggtgccgtcctcgccgtagacgatcgggaaaggctcaccccagtagcgctggcgggagaacagccagtcacgcagacgatagctcaccgtgcccttgccgatgccggcagactcgagccaggcgttgaccttggcgatggcgtcgtccacgcgcaggccgtcgagggagagagcgtcgcccttggccgcggtggcttcgacgaaagaattgatcacgatgccgtcatgggagacgaacggcgctttgccctcatagttggctaggtcgtcgccggattcaggcagaggcttgacggtgtagatgaccggcagtccgaacttcacggcgaagtcgtaatcgcgctggtcgccgccaggcacggccatgatggcaccggtgccgtagtccatcaggacgtaatcagcggtgaacagcggaagcttagcaccagtaatcggattggtggcgtacaggcccgtgaacagaccggtcttctcgccggcctcgtcaacgcggtccttggcggtcttggcctcagcagccaaacgataggccttcactgcctcgaccgggttggcatagccgcccttccaatcctcgggcacatcagccggccattcggcaggtacgttctccagcaggtggtgttccggggaaacgacggcgaacgtggtgccgaacagcgtgtcgggacgggtggtgtagatttccatgtccttgctgccatcggcggtggccacggtgaagtgcacggaagcgccgtgggattcgccgatccagttgcgctgcatgagcttgaccttctcaggccaattgatgccatcgagatcctcgatcaggcggtggccgtacttggtgatgcgcatggaccactggcgcagctcacgctggaaaaccgggaagttgcctcgctcggacttgccttcggcggtgacctcctcgttggccagcacggtgcccagacccgggcaccagttgaccggggacttggagatataggccaggcggaagtcgttcaaaatgtcctgctgttcggcctggtcgaggtcggcccacttcttgccgtcggactcgtgacctggaatggccttctcgccggattcaaacttggcaacgagttcggcgatggggcgtgcggagcccttggaaccagaggggttggtggcgtcctcgtcataccaggaatcgtagatgcgcgagaagatccactgggtccagcgcacataaccggggtcgatggtggcgaaggtacggcggttgtcgaagctcaggcccatgcggtgcagctggcggctcatgttggcgatgttcgcctctgtggtcacgcgcgggtgctggccggtctggacggcgtactgctcggcaggcagaccgaaagcgtcatagcccatggcgtgcaggacgttctcgcccttcatgcggtggtaacggctcaccacatcggaggccagatagcccagcggatgacctacgtgcaggcccttgccggacgggtatgggaacatgtccatggcaaagtaggcggtgcggccttcggcgttgcgacctttgccgtccttcagatcgccattgacgttggcggcccagaaggtgcctttctcatcccagatcttctgccatttgttctcgatatcctgcgccagcgcggcgttgtagcggaagttgggctcttcggtttgcgtgctcttctcgttgtcactcataaatcagcaaggtagccgcgcaactggacacgtcgtcaatcgttattcagcatccgagacgatggcctgcgggtcgacttcccgtgtgaccgtaagccgagtttgccgcttcaattcagcccgcgcggactcccagctgccatctgcgatcatgtccttgagcgcttccgagattttctgcgccaactgtggagtcccttggcttacggcgataccgtattcgaccgaaccctcatcctgcagcacggtcatatattgcgggccattggcctgtcgcagaccggacagcaccaccatgtcggaggcgatggcatctgctgatccgacctgcaccgcggtgacgcattgcgcgtagctgtcccgttcctggaattgggccttgggatggttcgcgcggaacaggtcggcggtatcatcgcctttcactatgcacaccatgcggtcggcgatgtcaccgatgccgtcacccgcctgcgcaaaatcagctcggtcgtcagtcctgatcaacagacccacaccagtgcgcaagtagggtccggcaaaatccgcttctgccttggaaccatcggtaatcgcccaggatgcgacgaccatatccacttgcccgttgttcagcatcgacgcccggtttgcgggccgtacctgcttgaacacgatttgcttgttcgcatagccgagtttggccgccacatatttggcgacgctaatgtcaaatccctcataggtgccgtcatgccacgcgcctattgccggctcatccgcagcaacgccaattgcaagcgttggtccttccggcgaaccgttgaccgtggtcacctgaatctgaccacatccagacagcatcagcgcgaagcccaaagcagcagcaatccccgcaaccagacgggtgcggatgcagcggcgcaaacggaaccagttggtcatggatgaaccggcttatttgaacatgcgcgaacgggtgaggaaccaagtgaccagaatcgagagcgccaccgaaatgacgacaatcgtgataaatccccacggcttatcgctgaacggcatgccgagcatgcctccttggaagttcatgccgtacatcgagaaaatcagggtcggaatggacaacgtgatggagatgatggtgaagatgcgcatcacattgttcaggttattggacacgatcgaggcgaatgcatcggtcatgttcgcaagaacgccgctgtagatgttggccatctcgatagcctgtttgttttcggtgatgacgtcgtcaagcagatcctcatcgtccggatactgcttgattcggcttaacgtggtgagcttctccatcacgatttcattcgatttcagtgacgtggtgaagtacaccaaggtcttgctcagctccatgagcatcacgatttcacggttctgcatggagtggcgaagcttcaattcgagcttgtcgctttcgcggtcgatgatacgcaggtaacgcaggtacatggtggcgttgcggtacagaatctgcaggatgaaccgcgagcgcatgaaggtgttgaagccgcggatggtgccttccatgaacggatgaagcacgggggtgtcctgcatgcagacggtgatgatgagattctcggtcacgataatcgacaacgggatggtctcataccagtcacggccaccgcgttcttccacggtgggaatatcgacgatgatcatcgtgtattcgtcttcgacatccacacgtgaacgttcctcgtcatccaggggggcgcgcaggtcagccagatcgatgccggtttgcgaggcgacggtggcaagttccacatcggtgggttcactgagacacagccaagagccgttctccggtttctcgatctgctccacttggccattgatcgagctgaagattctcagcatgtcgtctcacccgcctttcgcgctttcctactgttctatcgctgtacggttccaaaccgagaatagtctaaacctaccgtttgaatttgcggcgaacgcgttcatactgtgttccatgtccccacgccaacagccgatatgcggttgtgccatgcggatatggcgactaacgtatccgctcaccacacaatcggctgccagcctggcatgtgcggtccgcgcaggtcggcgggcccgttctcccagtctgcgcaatcggcaatggcgggcgccttgttgtattcttccagctcccacagtggctgctccgtcgattggccattgacactgtgacgcactttcagtcggcaccaacaggcgttgcgcatggcaccaagcgcgttcataccgtcaggatccagatcaagcagattggcaatggtggcggtaatccatgagccatgggtgaccagcataagcgtggtgggcgtgtcatccgcataagccgaatcacagaccaatgcgcgcactgcgtcggctccgcgcttgccgacttcggcgcgactttccaccccgtgtttggtttccccgccagtgtggtgcttccaggaggcgtagtcctcagcggccacggctttgatctcagcgcgggtcaggccttcccattcaccaaagctgcgttcgcgaagacggcgatcgcagaccaccggcaatcccagcacatctgcaaaggcgtgagcggtctgttgcgcgcgaaacagatcgctggtcaataccaccatgcgccggccggctgccggagcttcctcatattgatgaatatcggtacgttccgcggcatccggtccgggctgagcgatggcttcgggatgagaggccagacggtttaccttggcccagtaatagcgtgaggcgagcgcgaatccggtttggtcgacctgccattggcctacgatgtcgagcggcacatcgatttggccttgcaaacgatgttcgagattgtattgggtgcggccgtggcgcagcatcatcacttcatcaatcattggcctgtcacctcgtttgttgcggatgtctgacgtattcatctcaccatgacccctagaatggccgcatggagatttctgagtcgacctgggcgtttatcgccaagcatcgctgtgaggatgtgcgcgatgtggctttgcatgccaaacgtggcgatggcattgatctgtcgtttgccttggagcaaatagctggctggcaacgcgcttcggtgaaattgcctgattgggcggcttgcgatggcctgattttccctccgcaagtgcctatggaacagtgttcttcacagttcactgcccagtacaaggctcggctcgcccaacatttgctggaaaaccatctcgctgatgctgatgcatccgactcgacttctctggttgaccttaccggtgggttcggcgttgatttctcgtatatggctcgggtgttcgaccatgccacctatgtggagcggcaatccaatctttgcgatatcgcccgtcataattttccgctgcttgcgcttgctcacgccgaggtcatcaatgacgattccacggcggtgttgaggcagcttgccccggtttccatgatttttctagatccggcgcgccgtgacgatcacggctcacgcacgtatgcgattgccgactgcacgcctgatgtactggccttgcaggacttgttgcttgtcaaggctcccctcgtcatggtcaagctctcccccatgcttgattggcataagaccgtcaatgattttgcgggcgcggtgcacgaggtgcatatcatctccaccggcaacgaatgcaaggaactgctgctcgtgctggagcgcgaacgctgcgcggcgcctcgcgtggtatgcgtcaacgatgagcaaatattggaatatgaggcgaaccatggtagtaccgaggatgccgacggtattgcgcatgccagcagtgatggcgaagagccattggccggcactcgcacaggtgctatcggatccgaccgttggcagtatctttatgagcccaatgcctccatcatgaaggccggttgtttcgctgtgatcagccaacgattcgacgttcacccgattggaccgaacagtcatctcttcgtatcagcaaaacccgttgatggattccccggacgatcgttcgccatcgaatcaatcgccacgatgaacaaacgggagctgaagcaggctttggccggacttacgcatgcgaatatcgccgtgcgcaacttcccgctttccgtgacgcaattgcgcaacaaactcaaactcaaggacggcggccacacctatctgtttgccaccacggatgcgcaaggccggcacctcgtcctacgcacccagaaacaataaagctccctctgatgagggagctagctcgcgaagcgagactgagagagaacaggtgtagtctgccccagcggaaggaaccaatcagtccttggcgatggtcttgccggcggtcggaccggaagccaggttctgaatttcggtgacttcgagcaccggaatcacggccggcttcttggtgcccttttcttcggcgaccttgacctgctcgttgtagatatcgtcgtcaacgtgcagcaccacgttgccacggaagcggtagccctgcttcttctcgaggttggcgaaggcgatgaccagcggggagccgttcttgagattctcgtagtgctggccagcggtgcgctcgtggtaggcaatgtgggtgtcgtccagcacgaacagggacatcttcgggccgagatccagttcgccgtccttggagatggtggtgatccagccgaggttgttctggatgaattccttgatttccggagtgatgactgccatgtcgaatcctttcatgggtatgagtacgacgtgttgttccactcttaagggtagcggttttcttcgctgccggcacggatgttcgctgtgagtaacctcaccttcacactgctttcattcgccgttcaccgccggagcgcaaggctcgcagaatcctctttttgactggtagttcccgtaatctgagagccgagagagccacaagttttccgttttttctaaggtgagtgtgtgatgggtttgatcgagcgctgcaaccggctgcgtagtcgttggtcacgtagttttccgccgaatctcgcccgtctgatgttgctggcctgcgctgcgctgtggggaggcagctatctgctcgccaaattcgccatgacggcgatcccggcgcaatggctgatggcccttcgcatgttcggcgcctgcatgtgcatgctggctttattccacaagcacatcgtgccgtacctgacgccaaagatcatcgtgccggcgctggtggtcgggctgacctattggggcacgatgatcacgcagaccattggattgcagaccatagaaccgggtcgcagcgcttttctgacggctgcctattgcgtcattaccccgttcgccacatggattatctccaaaaccaagccgagagccatcaatctggtcgccggcgtgatctgcctgatcggcgttggtttcgtgtcgttgaagccgggaggctcgctctccttgagttccggcgactggcttaccatcgccacggcggttattttctccttcaacctgacctgtctgggcgtctataccaagcgttttgatccgattgccgtcaccttcgtgcaatttagcgtggccggaatcctgttttttatcggcgcgttggccaccgaacccgcgcctgatgcaggatggctggcacctccggtggtggccagcgtgttgtatctgttccttggtgccacgatgagcgcgcaaatcatgcaaaatatcggcctggcccacgtgccggcatcgcaagcgtcaatcatcatgtgcacggagagcctgtttgccgtatcgttctccgcactgttctggggcgagcgcatcctatggagttcgttggtcggttttgcgctgattttcgccgccgtgctgatgtcggtcatcaaaccgaccaaatattcgctgcatcgtaactaattgcccaatgccgtcactatcatggtgacgtttgcggcgtgttgtgtcgccgtcatcatgaggaggaaatcagcatgaatctgcttgagtccatgcagaaacgccatgccgtgcgcgattacaacgacgaaccgctcaccgcggaacaggtgaatactcttgatgaggccattgccgccgccaacgccaagcaaggactcgatattcaactcatccatgatgtcgatgacgcattcgggggctgcccgacccactatggccggttcaagaatgtccacaatcttattgcgctgattggtactgactcgcctagcaatgaggccatactggacgagaaggtcgggcatgccgggcaattgctggcattgactgccgtctctcttggactcgacacctcatgggtggtactgcatgagaccgctgatcatgacggcgcgtggacgctcgccgaaggggaacgtatgcccgccgccattgcactcgggcatggcaaccgccccggccgaccgcatcgcagcaagccggctaaggaactgggagccgtagaaaccggcgattacgcgaatgcacccgactggttcaagcggggcgttgaggcttcgatgctcgcgcccagcgcgttgggcaagcagccgttccgtttcacgctgctcgcggacggccgcacggtaagggccgaagcattggaaggcgtacagccggaaatcggactgggtatcgccaagctgcatttcgaattggcggccggcaccgatagcttcgtgtgggcataggcgttcaatcgtgttgtaccggttgagcctatgacgaaaccggccatatagcgccacaatacacaacgcgtataggctctatgtgaaggttttgcagggtacttgtaagcatttcgtcactttcagagggccttcagcaaccttcaagcacagacatctaccgtcgtatgcgtgaagaagtttttcgaaggtctttccatttcctcgatcgtggccggagcccttgctgccgtcacctcattcctgttggcgtcgaagatcggcatcgcaggttcggtgattggcgccgcggccagctacatcgtgtccgcggtcgccaccaacatctaccaaaacgtgttgcaggcttctggggaaaagcttcagagcgtcggttccacggatgatgacgccgccaagcacggcgaatcagatgccggtagcaatgattcctcacccgcatctgaaacgaaacttcctgcagcctccggcgatgcggcggatgcccaacagagcgacgatatcgatcgacccgcgcgggttgaagcggcagccagcgaaaatcccgaaaacaccatggttgctgcagccgcggcaggtgaaactactaccagcctcggcaccgcttccacacccgctacacgtgagatgaccaccgccctcggcaccgcctccgcaccagctgcaggccgtcgcacacctcgcgagattgtttctcgcccgactgcacagcgttcgcgccacacgtattccgtcaaggaactgcgcgcatcacgccgcaatcccaagcgcacagctgttatcgtaaccgtggtatccggcctgttgtccgttgccgtaacagccggcatcgtgctgctcatcacccaaggcaacggcacggacagcgtggtgcgaaactggatctcccccacagtcaccacgccttcgcccgagcagaccgagtccccatcgactcccgaccagcacacgccaacggacaacaccaatacgccgaagagcaacggcaccacgaccgagaacgactccgctccctcagggtcgtccaactccgatagttcgtctggttccaccgattcgtccggctccaccggtactggctccggcaacacgaataccgaatccggcaccaacagcggcacggagaccaacggcaacaccaattcaggaaccggcggaaactccggctcgaactcgaccggctcagatgcctcccacggatcggggtcttcaacgaattcgggcactaccggttccagctcaacgggttccggcaacagttcgacaggctccagcagctcatccggcaacagtatcggcagttccaagtccaaatcctccagctcgagcacaagcagcagcgccggcactgatatcgacgtcataggcgaatgacgtggggcaatgcgaaacttggacgtatgactacagttatcatgcgcacctgcgaaggtgacatgcgcatgatgcttcttctttgggatgtgacatcaggaaacagatcactggaaatcgttgaaattccaatcaaagccactccaagagccctgaacaatcccgattttcccgaaaaatagaatccccgaggccgcagggcggcaccttattcaaaatcaccggcgtaggcaattactctttcttctaatggtttttcaagaagcagagaaagacaaaacaaccgatgtccaacggagacaggaaaagacgaaaatggggatgcgtcgtcgcctgcaaggacgcggacggaagcatcgtctcctggtgcactcagaaccacgctcttcacatcctttcgcgtgtcttcaactaaagcggtttagaataatgctgttcccttgatatgtatacccctcaaacaaagaagttgaattatgacgaccaccgcgataccgaagtcggtctcggatttcatgcagcacatcacggacctgtgcggcaccgaacacgccgcctgggccgagaacttcaacgcctgctttgccaacaccctgaccaccacggtcaaacggcatgatgacggcaccacattcctgctcaccggcgatatcccggccatgtggctgcgtgattcgaccgcgcaattgcgcccgtatctgacccttgccgccgaagacgacgatctcgcaaacatgatcgccggcctggtacgccagcagttccgctacatcaccatcgacccgtatgcgaatgccttcaacgaggagccgaacggtgcttcctgggacaaggacgatcagtccgacttctccagcccttggctgtgggagcgcaagtacgaggtggactcgctgtgctaccccatccagttggcttggatgctgtacgcgaacaccggcaacaccgatcacttcgatgccgaattcatcgccggcgtcaagaagattcttgacgtattcgagaccgagcagcatcatgaacgctccccgtatttcttcatccgtgacacggacatccccaccgaatcgctgagcaataacggcaagggttcgccggtggcgtacaccggcatgacctggtccggcttccgccccagcgacgacgcctgcacctaccactatctggtgccctcgaacatgttcgccgccgtggtgatgggctatctggaacgcatcttcggcggtgagattctggatgatgccgatatcgccgcacgcgccggcgagctgcgccacaccatcaccgaaggcatcgaaaaccacgccaagacgacgaaccgcaatggagagacgatttacgcgttcgagaccgacggcctgggtcacgtcaatgtcatggacgacagcaatgtgccctccttgatggcggccccttacttggggtactgcgcaccggacgatccgacctatctggcgacccgacgcacgctgctcagcgacgaaaacccgtactattacgagggcgagtatctcaagggcatcggctcaccgcacaccccgccgcgctatgtgtggcccatcgccctgtctatcgaggcgatgaccagtgacagcaaggacttcaaggcgcatatcctcgaccgtcttgtaaccaccgacgccggtacacatctcatgcacgaaggcatcgacgtggacgatccgaccaagtacacgcgcgaatggttcagctggtcgaatatgatgttctgcgaactggtcatggactatttcgacattcgtgtgaagcactaagacgtgcccgccgcatgctcattgcgcacccaccgcatgttctcattaaggaaaggaacaatcattatgaccaataacccacgttatacgctcggcaccgaagccaaccgcattttcatggcttccgaaacctacgagctgctgaagttcggcaaaggcttcccagcgccggatggcggttccggctggctgaacgccgacggcaccctcgacccctcacacggcgtcgaaacgtggatcaccagccgtatggcccatgtgtattcgattggcgccatgctcggatacccgggtgcgggcgagctggccgatgcggcgctcaagggattgaccggcattctgcatgacgacgagcacggcggctggtatccgcaggtgttcgcggacggcacccatgctctgggcaaggtctgctatgcgcatgccttcgtgatactcgccgcatcctctgccctgctggccggacggcccggcgccaaggaactgctcgacgaggcgctcgccacatatgacgagcatttctgggacgacgagatcggcctggccgtcgacacctgggacacggcattcaccgcactcgacccctatcggggcctgaacgccaacatgcataccaccgaggcgttcctggccgtggccgacgccaccgggaacaacacctatcgcgtccgcgccggccgcatcatcgaccacgtcatcgaatgggcggcacacaaccggtggcgcatccccgagcatttcaaatccgactggtcgttggacctcgaatgcaacgccgacaagaaggacgaccagttcaaaccgtatggcgccacgccgggccatggcatcgaatgggcgcgcctcatcgtgcagtgggcgctgagctccttcgccaaccgagacggcgcgcggccctacatcgacgccgccgagcacctgtttgcgcgagcggtggacgatgcgtggaacgcggacggcgtggaggggctcgtctatacgaccgactggaacggcacaccggtggtcaccgaccgcatgcattggacggccgccgaatcgttgaacaccgccgccacgctgcacgttgccaccggcgaggcacgatacgccaactggtacgccacgttcgcccgctacgtcgacgagcacgtcatcgaccacgaaggcggatcatggttccaccagcttgacggcgacaatcgcgtgatcggcacggtctggccgggcaagtccgatctctaccatgcgttccagtccacgctgattccattcctcgacccggctgtgtccattgcgacggccgtgaagaacgcagaataatcggcgataagtgataacgtccgatattttgtgcaaaaaaaaatcggacgttatccatcatctcagatagtcgaatatgatgcaacacctcgcctgtgaaactcatctttcagctgggcaacgatgatattgcggcgtgactcggtgcacaacatagagcaatctcgacctcatgcaatcgcagtacacgaccttccatcgcatccaacctaattggggtcggaataattgtcagaccatgctgtcctggaatatcgtaaatttcgtttccgggcatgcgaacgcaccttaatgattacgctgattgacggattggacaagtcaaacgtccttcgtcccactcaacaggacgaaggacatagccggctcacgccaaactggtgctgtcacgtacaatcaatttcggggtaagtatcttacgatttccgctcaccggctccccagcaagcaccttgagcagcaggttagccactttagtgccatatacgccagcgtcacgatgcacggatgtaatcgaggggtaaaccgcctcgcatacaaaactgtcttcgaaactcacgattgcgggaatactatatggatatagacgtttatctccatcactacttttacgatcgcggttcaaacagtccgcagcaagcgcatgtagactggcggccgcaagaatttcattctcgtagatgaacgctgtgggcgcagcaagctcccccaacaatcgcaatgtctcgcccaccgccgcattcggatcaaaattcgtgaacgacacggatgagaattcaaggttgttaatctcggcaaatttccgaaatgacatttctcgatcacgagaataatccaacatcggatcgccggatatatatgcgattcgcctatatccccgtgacaacagatgatcaagaatcgctcccatggtcttcgaatcatcaatcgacaaagacggtaccagattgcttgggtcgggaccgccagcgagtacagcaggcaaacctaattcagcaagcaatttcggtctaggatcatcagccttgagatccaccagaattacgccatccacccgtttccgagacgcccaatcacggtatacatccagctcctctttagtggaagagcaaggacgatacagcaagccataccgttggcgacttaatgactcatgagcgcctgccatgaaatgcagcatgaacgtctcttctttaagcccctgcacagaacgagatggagcgaatcccacagtcatggttttcgaggagcccaatgcctgcgccgcatatatcggacgccaccccattttcgccgcagcctccttgaccctgcgcttggtctcagcggatactccgggacgatcattgattgcaaaggaaacagcagtctgggaaattcccaactcatcggctatatctttgagactgacccgctgcatactggaagttgctccactagaggtggatttcatgacattcctccattctgtgaagcttgacatcgaacatcggacatccggcatggcttattcgtataattctgtcacatcaatgaactgataacatacatttcatcatattgcgacagcaaaatggacgccaactgttggcacactcatccggccaacaaagatgaaccaacgaccgatttagtctacagactcgaatgcagggtcggagacagcggaatagaaacgcgctgcatgaggagacgtatcccaatgcaattcggtaattccccgttgtctgagttcaccgtcatcggctgcaacagtcgacgtgacaacagtcggtcgcttgcctgcgatttccagcttcatccacaggtcacagaccgaccctcccggccccagcgtgctacggttaatcgggttaccggttccattcacgtccactacaatagccaccgatttcgcctcggcaggccttgcatcacggtattgtgtcgcgagctcaccatatacgcggccaatcggcttgactttaccgttctcatcgaacaaacccaatgaatattcaagggacggaaaatcggccaaatatgatggcacatcatgcgagcaccaccaagtgatgccccacagattcgggcaatcaagagctttggtaaccacacggcgacaaaactccggtgtgtcttcagcggacaatacattctccggtgcaccaatctcctgcagccaaactggacggttgaccggcccgaaggctttggcgagttcagccaagtacaatgcgtacgcgtagcattcttcactccgcgccccatatccttgtccaacaccattgaatacccacgagtgaatggtggtcaaatcaccttttgtggcagactgtaccggtgtgaacggatgcccgtccaggaaccaaacgccatcgttgacgctgtacaaagaaagcacgccatcccgtttggcagccgatagcaactcatcgagccacgtatcaatctgctcggatgaggcagacatcttggccggatgaggccggtcggacaactggttgacttcattgccgagcgtcaatcccttgaaggcatcctcttcggacagttcatcggtcataatcgagaccaactcacgttccgattccacagcactcggatcagtgaacatattccctttatgccatgtgacgagccaactgggaatgaagtcaaagctcgacaaatgcccctggaacacatccacataggcatcgagcccatgctcaccggctatatgtaccatgcggcgcacgtcagccacacccttacgattaatccatgtccggttcggctgcaggtacggccacacaggaaagatgcgcacgtgatccatacctaaatccttgatctgccgtagatcgttgtcgatactggtccagtcgggatcaagccacgaatgaaaccatccatgggacggagtgtaatctactccaaacttcataagaatacctttcggtcagcccttgatgccgccctcttctacaccacggaagaagtagcgttggaaaattaggaagaatacgataatgggaacaagtgcgataaccgtgccggccgcaatcaaacggggatcagaaacaaactggttcttgagcctgttaaggcctacagtcaacgtataaaccgaatcatcaccaaggatgatcaatggccacaggaaatcgttccatgcaccgacgaacgcaaaaataatgacgacggtcatagtgcctttcacctgaggcagacatacattaaagaaacgctgccagatgctggcaccatcgactttggcggcttcctccaactcaactggaataccagagaacgcattcatcataagcagcacattcatagcactgcacaggccaggaagagctgcacccaaaagggtattctgcaaacctacggtcttgacaatgaggaactgggaaatcaatagggtctctccgggaatcaacattgcgctgaaaatcagcagtacgacgatcgtcttgcccttgaacttcaggcgagccagtgaatagccagcgagtgtggctccgatgacattgccacacaccgaaatggctgcgacaatcaaagaattcttgaaataggacaacaccggaatcgtgttgaacgcctggataaagttgtcgatagtcggatccttgggcaccagatacggagggatggcatagatatcatcacctttccccttaaacgctagagtcagttgccatagcagaggcccgatcagaatgagaaagaacagggtcaacagcacatattgcacgaccttgttgacttttttacctctcatcgctatcgacctttcgttgcacgaagaactcaacagccaccagactgccgacgattatgaataccaacatgctgaccgcgccggcataaccgtacttggcattcaaaccagtgccatagttcttaatcagcatcgtcatggtcacgtccttaccgccgacgccgccagtgcctcctgtcaagacataaatctcgttgaacactcggaacgcggcagcggaagacagcaacatgatcaacaccatggtggagcgcactcccggaacggtgacatgcaggaaacgacgaaccacgccagctccatccaattcggcagcctcatacagactgggatcgatattggccaatgcagacaagtagataatcatgtaatagccgagacctgtccagaccgtgataagcatggcgctaaataacagcagccaacgatccgtgaggaacgggacagcggctttgatgaagccggcaccttgtagcaaagcattcaccaagcctttctgactcagaaggttggtccagaccaggccgacgatgacggtggacactacgaccggcaagtagaaggatgcacggaaaaaggcaagaatcttggaattcccggaaaccagtgctgcaagaatcaatggcagtatcaccatgcatggaaccacgcacaccacatacagagaggaattcagcaagcctatatgcacagactcatccgaaaacatcttctggtattgttccagcccgacaaaatgaccgggattggagaaagtagcatcggtgaacgacagacggaccgtattgataaagggggcaatgacaaacgtcaacgcgatgagcaacgcaggaaccacaaacagccagcccgctatgccattgccttctttgatacgatgagcgtcatccacctcccatgccgtttcatgggaagcgccgccacggcggccggccttgccggccgccagcgacttcttgccggtaatcgacaaagtcattacttcaaatcctcattggcaaccttgactgcggcatcaagagcttcctgcgcagtctgctctccttggatggcacgggcaatctgctcacgaagaacagtcttggcattctcggagaacggcccaggagcaatgaaccagttatcgtctttcaccgccttggaggcaagggcaaccgcctgatcctgcaaggaatcaccagttgggctgaatgcttcgtcgtcgacagcacccgcaacagacgggaaagtgtgggacttagtgcagaattcggtctgattctccttattggtaacgaacttagcgaatttcatggccattcccttgttcttagtggtcttactgaccaccagcgtttccatggcaacattcatcttgccgccttcaccaagcaatcgctcggtaacgccaagattcttatacagctccggggcattagcctcaaaatctgcaaccgaataggcagaacccgccagagatgccacgctgccctgcttaaatgcgtcgccctcaccagtccaagtattattcagcgcttcggcggacagtgctttctggttgtacatatcgataaagtgctgaacaagttcaacaccctttttgtcgttaaaagtgaactcggtttggtcatcattcatcaattgcacgccatactgtccaaaagactccaatgtgggcacagaagccaccatgctcacggaaccgttgcagttctcgcccatggtcttggccgaatcgaaccattcatccatgtcagtaggcagatcagcaactccacaccgctcaagaacggctttgttgtagtactgaacaccagaattgagataccaaggataggcataagcgccttcctcgatattatcgccctcaaaagtcacattaccccacgatgaagcagtgaactgggattctgcatctggatcctcccgcgacaggttcagagtcactccagctttggccaggctataggcaccagtcgggctcatatccacaacgtcaggcagcgttccagcggctgcgtcagcattgattttatcggtatagccgtcggcaggctgatcaatccacttgaccgtgacgcctggattctctttctggaaagcggcaataagatcgttgaagtacggggtatatgtatcatttttcagattccaagtctgaaaagaaatttcattgctattggaggaagtcgaattaccgcaagcagccactgcgaacagcatagaacctgctccaacgacagcaatagtctttctcatggaaaacataccgtttccttctttcttttcgtagaaaacccttcgcccttttgcgaacgagaggcccttgcacgccatgcctcaacaaatcaacatgaagctagtctgttgagagtcacaattattgaggtctcatcgctgagactaaaccgttttagtttccagccaaccgcgtatctgttaactaaatcggtttagtgaaactataacacaatcgaaacatgcacgcaatgaattcatccgcgcgtgtcgcattgatatctgcctaacgggatcacccccctcttctcatacaacaatgggccacgcccaaccgtatggcagagccggtctgctccggttccgttacggttgggcgcgacccaaaatatcgagcctaggcccaatatcccttatcggcgaatacgcagcgtggcgagctggaacggtgccaacgagacgaccgcaccgtcggcaggcatcggctcgtcgccggcgagcgagcgcggcaattcggtgtccagttccggctcctccatgagattcacctcctgcacgctggccttggcatcggcgagagcggcgtcaaggcgtagtgcggccgtggcattgccgccggcggcctcgtacaggcgcacaatcagatcgtcggaaccgtcatcggcgagcttgacccagtccaatacgatggtgccggtgacgtcggcgagcgagaccagcggggccaagtcaggcaactcccctattacagggctgttgagtcgcgccgcctcgtccagcactgcgttcatatcggcgtcagcgaccagagaccatgcgaaggagtgcgtgccttggtcggtgcgtggatcggggtacagcggtgcggacagcagcgagagccgcaccatggtgccgcggccggcgccgtgcgccgcgtcggcgtgggtggggctgacgtcggagccgtaggtggaggcgttgaccacagcggcggcatagtcggcatcggcgatacgtacgaagcggtgtgtgcagctttcgaatttggcatcatcgctgcgcgtgttcttattgattgggcgctcgaccaggccgtactggcattcatattgcgcgttcaccgcttgcacggcgaccggcatatccactttgaggaaatgttcgacggcatgccagtccacatcggcggtgaagtccagtgtagcggagcccggccttaaggcaatgcccgtacgaatttcaacgcccttcgcgcgagtgacagcatgtacgacggccccaccgttggcggtttcatccacgcttgtaatcgatgcctcgctgagcgcgttggcggtcaggaacgcatcgcgttgaatatcccaggcgtcccagtggaagggttcgtctttgagcatttcgtagcggcccagtcgggtgccggctggcaccagttcacgattggctcgctgatcgagaaccgacgatacggtgccgtcggcttcaatgcgcacgtgcagttggccgttgtcgagcacaatcgtatcgccgtcatgggtaacggcgacccgagccatggatgcggttcccgcttcggctcggctcgaagccgggcgtaccacccacgcctcacaggcttggtgggaatatggggcaattacggcgtcggttatggttgcgtcatcgggttccacggctgcgatcgcgcgcccggcttcaagggcgatctcgttcagccaagcgatgtcacgcgcgtattcggcccgcgcctgacggtgtacccatgcgatggccgaaccgggcagaatgtcgtggaactggttcaggagcagcgttttccaaatacggtccagctcttcgcgcggatagacatagtccgggttcttgatgcgggccgcggcgcacaggtattcggtgacgcgcagcatcgactcctcctggcgacagccacgcttcatgttctgctgggcggtgagggtggcacggtgcagttcaaggtacagttcgcccttgaacaccggggtctctccttgcgcatcgtcgacgatatccttacgcacgcggtcgaacagttggtcgggagtaccgaattcgattttcggcgcgccggcgagatcatggtcgcggcggatgcgcgcggtcatctcacgggtggggccaccaccgccatcgccgaagccgtacagcagaatcgcgttacgggagaggtccttgtccaggaagttgctctgcgaatacatcagctcatgcatgctcatccacgagcagtaggtatccgagggtgggaagtgcgtgagaatacgcgtgccatcgatgccctcccacatgaacgaatggtgtgggaacttggtggtgtcattccacgagatcttctgcgtgaggaaccagtcgaatcctgcacggcgggcgatctgcggccaggagccggtgtagccgaaactgtccggtagccagatgccacgcgggtcgacgcccagatgttccttgaagtaacgtttgccgaatgtgatctggcgaatcagcgattcgcccgcgggaatcatgttgtcggattcgacccacatgccgccgaccgggatgaagcggccctcggcgatgcgcgccttcatgcgctcaaacaaatcgggatgctcgtcttccaaccattcatactgctgggcggaactcatggcataagtgaaatccggatcctcatccatcagggcgagcacgttggacaccgtgcgggccaccttgcgccgggtttcacgcaccggccacagccaggcggaatcgatatgggcgtggccgatggcgatgtgtttgattgcgctggaggcggccggttcggcgagcactcctgcaagctccgcccgggcggcggccacggtctcgagatcgcgctcgtcatacaggttcatggaacgctgcagcgccttggcgagctgccagtaacgcgggtcatcgtccttgagttcgcggatcagggaggatacagtttccagatccatgtagtaggcgaacacgtcttcgttgaagatggtgacgtccatacggctcagtgtgtatgggaagtcacaggtgccggtggcctcttcgccgagttcagtgggtgagaacggggtggggccttcgacgaatgggttggcggcggcttcgatatagacggtgaagtcgccatgttcatcgagttctacggtgctgctgccgtccgcgtagacgagtggaatccagtggttgcgtgggttcgcggatttgatggcggtgccatcggcacggtaaacgagcccctcggattggaatccgggaccgcggtgatcgagccagccgaggtctaccatgagttcgacttttctgcctttgaccgccgccatgtcgatatggccgttcacctcgaaccatgtggtgccccatgtggtgccccaaacgccgggaatgcggaaaggttcgaagggcacttggccgttgcgcactttggctagaaattcgctggagggcaccggttcgccgggattgtggaacgaacgcaaggtgcatgcggtgagtgtggtgtggatatgcggtttgacgcgctgctgcatgacgcggtcgcagcgctccaactgctgattgggcagaagaaacatggagagttcagctcctttgctgtgtctggtgggaatgatggaaatgatgggtgtggtggcaattgggaaaaccgtaatacgacatgcttctgccgcctcatggttcgaggaggcagaagcgtcagacgggaattcagcgcgtgatgcgcagggtggtgagctggaacgggccaaagtgcaacgtggcaccttcggcgttctgcctaccgtcttgcagcgcgactggaaggtcggcggccagattgtcgccttccagcacattggtctcatgcaccgaagcgcctgcgagcgccgggcagacgtgcagcatggcatcagcctggccaccggccgcctcataggcacgtacgatcaggtcgccggaaccatcatcggccagcttcatccagtccagcaccacggtaccattgacggactcaatcgaggcgagcggcgtgatatcgggcacatcatggagtaccggtgcgttgagcacaccggcggcgtcaagcacacggtccaccgtggcgtcggccaccacggaccagtcgaactcgtgcgagccgatatcggtgcgcgggtcggggaaggtcggcgcggagagcaatgacagtcggaacatagtgcccgagtcacgaccttcggcaacgttcccggcgatcggtgaggcatcggacccgtataccgatccgttgatgacggctgcggcgtaaccggcatcaccgataatggcgaaacggttcgtgctgctctcatacttggcttcgtcggatgcggtgtttttgacaattgggcggcggatcagaccatactggcagtcgtaggtcgcctgatcggccacaatgcccagaggcagatcgaccttgaggaagcgctcgcgttcgtgccaatcgatatcggcatggaagtcgagcgtgtgcgagccggggcgtagcgtgatggtggtggtaatgacggtgtcaccgtcggcggtatgcatgtggacctgtgccgcaccgttttcggtattcaccgattcgattgatccggtcacggcattcgccatgagcagggattcgcgttcgatctcccacgcatcccaaacggcgggctcgtccttcaacagctcgtatcggcccagtcgggtgccggccgggaccagttcatggttatgctcctcatcaaacagtgaagaaatcgtaccgtcggcctcgatggtgacggacagtacgccgttggccagaagtacacggccgttgtccagcgtctgagtcagcacggaaagcgcgtcggtcggttcgttgatgcggttggcacgccaagacgcgccgtcattgcggaactggctgatgcgggcctcggcgagcaagtcggcctgcgggttggccttgcgcagcacggcgcacatgtcttgggcgatttcagcgagacgcttcaggtcacggcgatagtcctcgcgggcttcgcggtgcacccatgcgatggatgaccccggcagcacgtcatggaactggttaagcatcagggtcttccagatacggtccagttcttcgcgcggatagtcatagttcgggtcggccaacgtggcggctgcgcccaggtattcgaccgtgcgcaacagcgattcctcttggcggcagccgcgtttcatgtcctgttgcgaggtcaaggtgccacggtgcagttcgagatacagctcgcccttccagacgggcatttccgggccggcgttctctgcaagctgctgatgcgccttgccgaagaagtcattcggctcttcgatgctcaccttggagacgccttcgaggttctcgtagcggtgcaggtgctccatcatgttgcgcgtggggccgccaccgccatcaccgaaaccgaagagcagaagcgagcggtcggcgagatccttgtcctggaagttcttctcggcgtagtcgagttcctgaaccttgcaccaagcagcataagtatccgccggcgggaagtgggtgaagatgcgcgagccgtcgatgccttcccacatgaacgagtggtgcgggaacttggtggtatcgttccacgagatcttctgcgtgaggaaccattcgtacccggcacggcgggcgatctgcggccatgcgccggtgtatccgaagctgtccggcagccatacgcccttgggctccacaccgagatgttccttgaagtatttgcggccatatgcaatctggcgaatcagcgattcgccggcgggcagcatgccatcggcttccacccacatgccgccgaccgggatgaaccgaccttcttcgatgcgctgtttcatgcgcttgaagatgtccggatgatcctcttccagccaggcgtactgctgggcggagctcatcgcgtatttgaagtcggggtcggcgtccatcagagccaatgcgttggatacggtgcgggccaccttgcggcgcgtctcgcgcaccggccacagccatgcggagtcgatatgtgcgtggccgatagcgctgacgttcatggccgaggcgttggccggcttggccagtacgtcggcgagtgctgcgcgcgcggcttccacggattcggggttgtgctcgtcgtaggcgttgagcgaacgctgcaacgccttcgcgagctgccagtagcgcggcgactgcttgtcggcgagttccatcagggagctgaccacgtcgaggtccacggagtagtgctcgtagcgttcatcgaattcggtcagatcggcggacttgaatacgtacggctcatccggcttgccggtggcatggtcgcccagttcagtctcaacgaacggaggtacgccgagcaggagcgggttgctggcggcttcgaggtacagggtgaagctgccgtcttcggcgaccgacacttgcgcgttgccttcagcatccatgaacggcacccaatagttgagcgggtgtacagctttgatggcggtgccgtcggcacggtagacgaggccctcgatatggccgccgcaggagtgcgggtaccagccaaggtcgaggatgagctccagcggtttgcctttcgggtagccggccggcacagtaccggtcaggcggaaccagaccgtgccccatgtggtgccccattcgctgccgagcgtaaacggcttgaagtcgatgtcccctcgattgagcttcgcgaagaactcgtcagtgggcattggctctccgggaatgtcaaaggactccaccgcaagctgtgcgatcgatgggtggatatgagggtccacgcgctgacgcactatgcgcttgcaccgctccagttgctgttcaggtttcaggaacatctgctgttcactccccttatctctgccgcttgtgcggccacatcattgtgctgcccgttcatgggaaacatatcgacatgcgccatcgcccgcagaagactaaagcgctttagtaacatattggaaggaacaggatatgatgtcaaatcattatcgcaattcagcgtgttccgtcaggcatgtcatgctcggtatcgatgatgatggtcaccggcccgtcattgaccagtccgacccgcatatgcgcgccgaaacgaccttccttcaccggcactcccccggagcgcaacgcctcgttgaacttgatccacatgagatcggcatgctcgggcttgccggccttgatgaagctcgggcgattgcccttgtgcacgtcggcgaacagcgtgaactgcgagatggagagaatctcgccgccgatgtcctgaatcgaacggttcatcttgccctgcgcatcctcgaacaccctgagattcagaatcttatgagccaaccaagcgatctgcttgtcgccgtcctcatcggtgacgcccaccagaatcatgaatcccgggccaatctgctgcggctcgaacgtgggatccagcgtgcccaattcattgaccacgtccacggacgcttcggatactcgttgcaatacgactttcatggttccctacagtacaaggcgtgcagtcaccagccggtaacgtacgcaaccgactggtgactggcaatatctgcactgcagttcatcgtttaccgcttcattcgacgacgaacaccagttccgtacggtcgttattgccattgtcgttcttgcccatgagggatcctttcgctcattcgccagccggattgccggcgatatcaatgagcttcgcatcatgggaccagtcctaggtcgcttgacaagcgacaatataccacgtatcggcagcaagtcaggagacaagcgtaccgctccgcatcattgcccaagcaatggctgctcgtatcggaacaacatctcgttaatagtgaatacatcaaacatctcgtggacgatgaagaattccacgatcacatcgaatttcacgctgtgcgacagcgcatacccggcgcacgccaatatatcttgcgtctcgtcaatattcagccgtaaggcaatggccagcgccagaaccgttttcttgctgggcatatagccatcgccacagcgaattttagagaacagtttgcgattgatattcgctcgtttatatacgtccacgtcggaatatcctttggcgtcgataagcctcaagagaatgatgttaaaaggttcatccagattggagagcatcgcatcatccacatgcccggcggatttcggcgatggagctgccgacggtgccgagtagacaggcgtttcatccatatcgcccaggaaatccggcatgtccaagatggattggctgcaatgtattagacggtccgatgggggacgattgacgtgggattggaggccggcgatggccggcccgaagcatccccgccactacgaggagtcgttcaagcggcagatcgtgcagttgtatgagaacggcgagccggcgcgcgagatcagggccgagtacgacatctcgcattccacgccgcaccgttgggtccagggcatccgcgacagcggctccactcgggccgcggacaaccgcacgcccgggcggaacgatccggtcgggccggggaggcgcaacaggcagttggagatggaggtggacgtttcagaacaagtggcgccggtattcgcacgaaggcaggcgtgatacgggccaacgcctcccgctgcccgatatcggcgcgatgcgggatgccgggcgttccccgctccgcctactactggatgaccgaacatcccgaagccgagcgggtggacccgatcgccggcgacgtgcgcgcggtccggcgcgacgaccatgagcgctgcggcgccgggaagatcaaggccgcgctggagcggaggggcgtcaccgcgtccgggagacgcgtcggcaacatcatgcgcgaacggggcatgcgggcgcgtacgcgcgcagacggtccgaaccgcacaggacgcgggccgacgaggccaggctcgcgaacatcctcggccgcgagttcgacggctacgagccgcgcacccacctggccggtgacctgacgtacgtgcgcgtcggcggcgagtgggcgcacgtgtgcctgctggccggcctggcgaacaggggcatcgccggccacagcgccgacacgggccgcaccgccgacctggtcatggccgcgttcgccacgctcgacttcccgttgacggacgtccagacgttccgcaccgaccggggcggcgggttcgacgacgcgagaatcgacgggccgctcgacgtgttcgacatcagaagatcgccgtcgaggaagggcgacccgtacgacaacgccgtggtcgaatccaccaacaggctcctgaagaaggagctcatataccggaaccaccacaccggcctggaacaaccacgctccgacctcaacgactatgtgtggtggtccgacgaccaaagactccactccacccccggataccggagccccaacgaattcacacaacaaggactcgtcctctaaagaattgtccaacacaccgttgccaatccagatgccgaacgtcccgacgggacggcggccgtgtcatcaaagcgaccgcacgaactctccgcccggaagcggacggcgctgattttggaggacccatcggccgtggcattcccgggcccggaacatgccatggggtttgcggaccccgggcgacgctgcatagccttcccgttcccgcgccacgggcggcggcatggttcatggcgccgacggtgggtccgtccgcacgcggagcacttccatgcctcgttgacggatggtggcgatcccccccccacagagaggagtattgtttcatttgtagataacattgttacacggtaggagaacattgatatgcaatctgaacgttcgttgattcccacccccatgccggtccggagacacgcacggtccgggaacagggggctggccctcaccgccctgtgtctggcggtgctgctggtcgtgatggacaacaccatcgtcaacgtcgcgattcccacgatgagcgacgcgttgaacgcctcgtccacggacctgcaatgggtggtggacgcctacacgctgtcctttgcggcgctgctcctgcccgccggcaaactcagcgaccgatggggaagaagacggatgctgctcgtcggattggcgggattcgccgcggtctccgcagccacggccttctcttgggccctgtggcagctggtgacgctgcgcgtggtgttgggggtctgcgccgcgctgatctatccggcgacgctgtcgtcaatcatcgtcatcttcgaaggctccaggtaccgtagcctggccgttggcctgtgggcggcgacatcaggggtcggcatcgccctgggcccgatcatcggcggcgtcctgctggagcactatgcgtggaattccattttctgggtgtgctccgtcatcggcgtggtggcgctggcctgcatcgcggtggcggtgcccgaggtacgggcgtaccgttccgagaggttcgatttccccggcaccgtgttatcggtggccggcgtgggcctgctggtgtgggcgatcatcgaacgcccgacttacggctggctctcctggcaggtcataggcggcatctgcgcggccctgatcatacttgcggcgttcgcggcggtcgaggggcatacgcacgccccgctcatcgatgtcggcctgttccgaagggccacgttcacgagcagcatctgcgcgatctgcgtcgcgttcttctgcctgttcggcttcatcttcatcaccacccaatggttccaggcattgcgtggatacaccgcattgcagacggcggtcgcgacgctgcccttcgcggtggtcatggcggcggtcgccccgttcgccacgcaattggcgaaacgtttcggataccggtcggttgtctcgacgggactgctgttcctgtcggcgagcatgttcgtggtcacgcgtgtcgacgcccattgcagctactggttcgtggtcgtacccaccatggccctgatggcggccagcatcgccctgatccaagggcccgccacggacgccctgatgagcaccgttccggaaagctcgaccggcgccgcatcggccgtcaacgacacgatccgtgagatcggcggcacgctgggcgtcgccgtcatggggtccgcgatctcctccatctaccccgacgagctctcggactcgttgtccggactgcagatcccgtcttccatcgcgaaagccgcgaaggattcggtgatggccgcgaaatcgatccttccgcacctgccggcaggcatccgacagaccgtggagcagtccgtctcgaccagtttcatgagcgccacacatgcggcatgctggatcgcctgcgccctcgcattggcgttcgcgctgctctgctggatcacacttcccaaacacgattcaggcaatctcccccaatagaaaggaacatccatcatgaaagacgacggacggatcccacggatcaaggacacggatatgacggaccgtctcctgacggccggcgttccccgacatgtcttggctcggtggcaatctcaatgcggtgggaccagccatcacacccatcgaggcgcggtccaagagcgtggctggaccttcgaccccacccatcatgggatggtgcagggacctacgggccggatggcgtttttcatccgtaacggcgggatgatgcggagaagcatatgaggactattcggaaaacgacaaaaagccagcggacgcccaccaccgagatcaggggcctcatactcgacgcctcgaaacgaatcatcgaagaggacggctatgacgccttcaccatccggcttctctcagaaaaggcggatgtgtcccccgcgagcatctaccggcatatcggcgacaagcaggccgtcatcaacgctctcatcgacgacagtttccagacgttacgggagaagctcctgcgcgtcaccaccgaggatcccctgcaaagactctacgatgcgggagtcgtataccgcgggcacgccaaggcgtcgcccggcatctacgccctgttgtggcgatggcatgcgggcgaggcttcggaggcatgcctcgccgccatgaccgagctggtgcgctacgggcaggccgcgggaaagatccggagggatgacccgcacctcatcgcatggtccatatggtccgccgtgcacggattcgtccaattcgagacacgacccgaacatgatacgcccgtcgacgatgacgatgcggcctattcctttctgctccggctgctcattcgaggggtccgcgcctctcagacggtctccgagggaacggcgaccatcgcggataccagccgatcgtagaatcgccattggctgcgcaacgccacatcccgtctcacagcggcgaacgttccatccgtcttcaggctcacggataccttacggaagtcccccgtcccgtccaatgcggacaacgccttcgaggcggcctccttcgcgcagaaggccgccctacgttccaccgaggaggccatacgcaatgatgcgagctcttcggaagagaacacgaaccgcatgatcccgtcggacaatccgtccgaatcgtccacgtccactcccacggcacggattctttccgccgacgccacggcggcgacgcacagcgacggacaatgcgacagcgatcccacgatgccggatggccagtgtttatgttcaatggttttaagaccggttgagcgtttggtttttagtccgaaagagcggtaggaattagtccatttcatcgttgatggaaaacaagtgacaccggtctgtcgttatcgattagtttcccgagttgaaaaaacaaccattgacggttctcgggaaaggaaaggaatgaccataccggtgtcggttcaacaacgtatcaggctccttgaccagcagggaacgccatggcgagccatcgcccgtgatttgaacgtgtccagggacacggtcaggaaatacgccttgatggaggattgctcgcccaaacccaaaccatcgaccacgcggccgaggaaactcgacgggttcacgcccgtgatcgacgagtggttgcaagcggaccggttcatgccccgcaagcagcgccataccgccaaacgcgtgtacgacagactcgtcacggagaaagggttcaccggctcgtattccgcggtgcagcgttacgtgaagcaatggcatcaagaacatcgtcccgcctgtgacgggttcatggagctggaatggcggcccggggtcatgcaggtcgatttcggcgaggccgtggtggtgctggcgggcgtgaaaaccaaggtgcattgcctggtggcgtcgtttccgtattcgaacaagcgttacgtggtcgcgttgcctggcgagaacgcgcaatgcgtgtgcgagggattggtcgagatcttcgagcatatcggcctggttccgatggtgttggtgatggataacgccacaggggccgcgcaccggaccgcttgggacaagatcacgatcgtcgggctcttccagttgttcctggagcattaccggatcgaggccaggttctgcaatcccaggagcggttgggagaaaggcagcgtggagaacgcggtcgggttcctgcgccgcaacctcatggtcccgttgttgaacgtcgagtcctatgcgcagttaagcaagcatctgctgtcgcggtgtgacgaactcggcaacgacaagcattaccgggctgatgaaagcgtgaacgacttgttcgaagaggaccgggcgggcatgcggccattgccgcgcgtgcgcttcgacgcggtcgattggcaggaacggcgcgccgacaaggaaggtgtcatacaggtcggttcgtatcgttacctcgcgggcccggcctggcgtagctggccgctattggtgggattgcgcgcgttcgacgtggagatccgtacccgcgacggccgcaaggtggcctcgctgcccagggcttatggcgagcaggccggtacggtgcgtagcccgtcgtcgctgctgccggcattggcgcgcaagccacgcgcgtggggcgaatcacccgtgcgcggtgattttcccgagggcctgagaaccctgatcgacgcgcaggactccgcccggcgcaaggccacgttccgcttgttggagcgcgtgggtgccgcttgcggtttcgacgcggcctgcaaagccgcggaacacatcatcggccagggcagaccgatcgacgaggcagccctgagcatcatggccagacggatagcgtccggcgaggcgccggccgatgttcccgcgcccgacctgagcgtgtacgacgacttcatgaaaacaggcgatggcgatacgctcaaggagcgggaaggagggaaggaccgatgagccggatccagaaccccgcgccggacgccacccgacgccgcgcgtccacgaacaggaaaatggaaacgatcatgcgattggcgcgccgactgccgttgaccaggcaagtgctcgccgaccagctcgaaaccgcgaccccgtcgcaaatggagttcatggaccaatggatgaacgcggagatcgagtccagggaacgatcgaaacgatcccggctgctcaagcaggccggtttcccggccgtcaagacattggacggctatgactgggagaacattcgttttccggtggattggggcaggcggtcgcttgaatcattggagttcgcgagccgtccggaggatgtggtcatgttcggacctcccggcacgggcaaaacccatctggcgatggcgttgggaaggaaggcctgcctggaaggcatgacggtacggttcttcaccgccgctggcctggtcatgcgcttgttgcacgccagcacggaaggcaaactcgacagggaaatcgcgtccatcggcaaggcccgcctgttgatcatcgacgagttgggctacgtgccgatcgacgaggaaggcagccggttgttgttccaggtcatcaccaacgcgtacgagatgcaatccatcgtttacaccacgaacatcgagttcagcggatggggacgcgtgttcggggatccgaacatggccgcggcgatcatcgaccggaccgtgcatcacggcaggatgctcaggttcgagggcgagtcctatcgcaggactcatgctcttatgcaatgaaacaataaaacacgagcaatgacaggccagttccgaactggactaaaacctaccgctttttcggaaggaaaactcacgccacactggcctataacaacttgacgttgataatggttatgccggtttctgatcggtgataatggtggatgacggcttgggcggtgaccccacatttgactgacgccatcggttccggtggctgtccttattttgatttgtcccgcccatggccgccgacccgtgggccatggatgcatgacctcataggagcgtggccgctcccgtcggatcccgcaagaaccatggtagcgtgccccgtcaacgtcctgtctgcgccgcaagcccccgggaggcatccgaacacatggaaaggaacgacgacgatgacgccgccgaacgaagtggtgtgggccgggatcgacacccacacggacacgcacaccatcgcattgctcgacgagcggggcaggccgctgggcgccgagacgttcacggcggacccggacggatacgacaggctgatcggcatgctgcccgggccgggcagggtcgcggccgtgggcgtggagggcacgaactcgttcggagcggccctggcccgtcgtctcactgccgccggatacgaggtgcgcgaggtgctgcgccccaggcgaagcgtgcgccgcagggacggcaagtccgatcccctcgacgcggtcgccgctgcccgtagcgtcatggccggcgacggcacgagcctgccgaaaagctcggacggctgggtcgaggcactgcgccacctcaacgcgcagcgatcccaactggtgtcggcgatgaccgcgatctccaattcgacgaacgggctgctcgtcaccgccccggaacccatcagggaacgttaccgggggttgaggagcgagacccgcatgaacaggctcgccgaatgcagaccggccggcggcctggtcgagcggagcgtgctggccgcgctgaaatccgccgccaaggcatggaaggcgctcaaacggcaggccggtctcctggaggaacgcatgcgcctgatcctcgaggaacacgccaggccgctgctcgacatgtactgcgcgggcgccgtcatcgccgcgaccctggccatcgtcgccggggacaaccccgaacgcatccgaagcgaggccgcgttcgccaaactctgcggcgtctgccccatccccgcgtccagcggcaggaccaaccgacacaggctcaacaaaggcggcaaccggcagggcaatatggcattgcaccgcatcgccatcgtccgcctgcgataccacaagccgacccgcgactacatggccaaaaagacccgcgagggcaaaggcaagctcgagatcatccgctgcgtcaaacggttcatcgcccgcgaggcataccgggcgctcatcagcatacgcaacggcgaggtcggacgcgggaccccggccgaacgcggcgccaagctgcgcgaactacgcgtcagccggaacatcacccagcaacagatcggcgaggcgctctgcgtgccctcgagccgcatcagcgagatcgaacgcggcgcacgcgaccttcccgaactcgagcaacgggccatccagtggatacactcgacaaccaacccaaaacaacacacccaaacgcttgacaatgtataggagcatcaaaacacaggccagagcggttcaccatccgaacctttgagtatgggcccgtcatggccgatacgtcgtaaggcctcgtgggccaaaagacgcgtctccgtgaattcccttcttcgtttggccttggcgttcccgaccaaggcccgctcaccgtcgaacaatcgcacgcggcgcgtctcctcccccgagatcagcacctcgcagccggaggcgagcagcggcccgaacaggcgagcccgtcgcatcatgaggtctgcgcacatcatggagactctatctaccgaaacccacaaacccagcaacagcaaggctttctaccaattcccagaatgagtgtaccactctgttcgccgctcaaagcccgccagaaggaaatttgcgcttttccataccttcacgccgacaagaggtgtcacgattacctatatctcccatactttctatgttttttataaatatgtagacgcatttggaaacacaaaatatgtgtatgcttggagattgacaccaacagacccgacaccaaagggaaagcgggaaaaaccctcacttcgtgaactggaacagcagataagacgggatattgaggacggtatcgacagcacaggcaagaaaatgacgctttgccaactttatgccaaacagaacgcacagagggcaaatgtgaagaaaagcacaataaaacaacgggaacaactcatgcggttattgaaagaggataagttaggtgctaggagcattgatacgataaaaccctctgacgctaaagaataggcgttacgcatgaaagacaaaggcttttcctacaataccattaacaatcataaacgctcattaaaagcgtcattctatatcgccatacaagacgattgtgtaaggaaaaatccctttgatttcaagttaagtgaagtcctagaaaatgataccaaagagaaagtcgcattgacagaggaacaggaacaagccttactctcatttatcaagacggacaatgtgtatcacaagcattatgatgatgtgctgatattattaaaaacaggacttcgtatctcggaactgtgcggactgacagtagccgatattgatttcaagaatgaagttgtgataattgaccaccagttactaaagagcaaggaacaaggctattacattgaaacgcctaaaacaaagagcggaataaggcaagtgccattaagcagagaaacaatacaggcatttcaacgagttatgaagaaacgcccaaaggcagaaccatttgtgatagacggacagagcaatttcttatttgtcaatcataaaggcaagcccaaagttgcgattgattacaacgccttatttgtccgtatggtaaagaaatataacaagcaccacaaggacaatcccttgccacatatcacaccgcatacgctacgccatacattctgcacaagactggcaagcaagaacatgaacccaaaagatttacagtatatcatgggacattcaaacattagtatcacaatgaactggtacgctcatgcgtccatagataccgcaaaatcagaggttcagcgtctaatcgcatagaagtatttaccacgattttaaccacgattgacagggaaaatataagaaaatagacctagatatgcgaggtttaccacaaaagcaaaatgcccgtagagccgataaaataaggctttgcggacatttaggaagatataaaaagatagtcaaaaagacatatataattttatacatcaaaacaatctatacatctagcagaaccggggagggaccgtggtagggggccggtaacgttttgttggactcgtggcataatcaaatcatagaaacaaagaaatccaataaagcgacaccgtatccaagcgcccacctctatttgacggaatgcaccatattccggcaccgacgaacatcaggatcgagccccatcaccaatcggcgccaagccgcccatatcccatgattagctaaagatatctctgaatcacagcgttcagaaaggaggcgccatggaaaagccactgcttctgctggccttggtgccgctggccgtcggattagtcctgatatacgtcgattggatccaaaaaccgggaagagaacgcaaaaggactcttttgcgtgtcttctcagcgctcatggtcgttgccggcgcgttggccatcgcgagacaactcgtatgacgcttcacgctgcggcatgttgtcccggctattgcccacgcccattcccagctctccgcgccattccagcaatcacgtctcttccccggtctcaagcccatgagacacttggagccatggctaccattatcatgcgcacctcgcatgataatggtagccaactgtttttcgctttattccaaggttttcgatttttgggaaacctgccggttacgctcgttttccacgaggcacctacaggcacccaagaataatctcattcttctgtgcatatcagcggcttaccgacgcacacgaaagaagcatgcgagtgttcctgcgacctatctcagatggcgaagccgctcgatcagatcgacgagtgtctgttcctcctgttccacgcagtctaggaaaatggagcagaacgaatccggcttgccgtccacctgccatgcctccaggcctcgcgcgtatgaccgacccgcatcgtatttgatggccacgggacggtatccgttccgcagcagcacgaagttgagcagctggcggccggtccgcccgttgccgtccatgaatggatggatgttctcgaacatcgcgtggaaaccggcggccctgagcagcggatgcgctgcgcagccatccaacccgtcgatcaaggatcgcaggtcgtcgcggatctccagcgggtccgcggtcttgactcgggtggcggtgatccgcgccaaatagccataaggacggaacgtgccgcgggcgaacggctggagatccaatgcggtcacctcgtgtagacgacggatcagctcctcgttcagcttccgcccctccttggcatattcgcgcacgtaggccatgccgtcagcgacccctcgcgctgcgaacacgtatctggccggcgagtccgatgggacgaactcgccctccagcaccagcgacgtgtcctccagggtcagcgtggacccctcgatggcgttcgaattgtaggtgtagcgcaccagccagtcgcggtcgtaatccgccaacgccatgtcctcgacaccgtccaacggctccagcgagcgggcccggtccttcagcgcgtcgatcctccgcaggcgttcggaaatctcccgtcccctttcaagggcgttcagctcgtcgggaagggcctggatgtgccgcgacagctcgggattggccatcatgctcctcttttcgtgttccggttgcaaagtccattattccagtagtgattcgttgcgctagcggttcagatgacggctcaacgcatccggtccggttccgacgcttctggcatccccgtcccgttgtccaaggttcttccgcaacgtctcgccgaacctgcccatcaaatccgttttattgcgaatcgggccagaaacacgaaggacctcaccctccctgatcctgcggagcatcccgatacgctttaccaactgtacccggatggcatcgaggcgttcgggcgcgaacatgcgcatgcgcgacaactcgtgcgccacctcgtcgggccagtccgacagagcatccagatcgaaccggccccaatcctccaccagtttgagctgccgcaaggccgaggggcgaccggtcgccgaatagaacggcttggcgaaccagtcgcggtcgtccacatcgagctcgccgctccacaggctcgcgccggtgtcgtagatcggggccggacggaccgcaagggtctcgatgttccggatcagaccgaagttgttgtaatgcctatctgtattgcgcatgaggtagtcgaccacgagccaatcgtccgtggcgtcacgaaccgcccgttcgtctgcgccgaagccgacggcggcgcggatccactggtcatgcgagttgaggccgttgacggccttgacggattggagcacctgccaggcggagaccagctcctcatgattggagagcatgtccgcgcatgtggacaccagacggttgccgttgcgtgccagggaataccggacggccggaacgcccaatcgcatgcagagcctcgaggcgatgacctcgttcatgggctcctggccagtacggcccgacttgacgagcagtctcctgccggtggccctgtcgatcgtccagcgtttgggaagatcgccgccagtggacacgtcggggacgttgaggctgatgtcatgggacgacgagtacgaggtgagcaggatctcgcccagcgcctcgtcgaagggattgtcgaagaagttgacgtccttccattcggccgggtcgtcctcgcgtctgacccagtactggtccgacaggctcaaaccgtaggtcctgtcgagcagttcgtcggtcgatgccgcgccaagcgattcgagcacgcggcagatgccgtcgcgggtggaggggatggcgcgggacctccaccattcgtcgatcctcttggcatacagcgcgctcttgccgtgcgtggtgaactccaggggcagacgatcatggtcaaggacctcgccagaggagcacgcgcgaccggactcgggatcgtattcgaacgcaaggaccggatggtccccgcacatgatcagcttgcgtggcatgattccgctccctccaaacttggtctttaaagattctacaggcacgaattacgcgcgagacggcgtcccgtttcatgacgcggtgcatggatatggaccacttccgcaaatcgcaagcctcggcgatgatgccgacaactgatacggtagtcatattagtttcccaaaggtaaagaggcatgaccatgggattgttcgacttcgctaagaactctttgggtgacgtgccgtccggcttcggcggtcggggcgatatcgccaatcatcttttcaacgaccgatgaaaaggctccggttgaaggctatggcatgatgacatgagcgtggggacatttatgaccgaaggatactcacataaagcggcacacatcgttgagcatatcattctcgcaatcgcgctgatctgggctggaggctgcactctcatatggatgcaaacggatatgtcgcatcgcatcgtgaacgcgaaatccgctgacggcacctgcgaagtgaccatcagcgaactcggctcgcccatattcttcggcccaagcagcatcacggtcaaagtctcttgggacaccgatcccggtgttatcggttccgagaacgtcacggaaatcaaaacggatctacacaacgacggcaaatcattaggctcgggcaacttcaccgtcacctggcacggcaacatcccgaccgtcaccacccatggcgaggaacagccggaccaaagctacacattcaactggaaataaccgctccgaacattatgtctctcccgagagtagtcctcacaaccgggcaggtcccacaaggagcatagctcatgcacccaccgtccggtctcaagcccatgagacacttaagaccatgactacagttatcatgcgcacctctgaaggcgatatcaccatcgacctgttcgatgacaaggccccgaacaccgtggccaacttcctgggcctcgccaccggcgagaaggaatgggccgacccgtacaccggtcagccttcccacggcaagttctacaacggtctgaccttccaccgcatcatcaagcagttcatgattcagggtggttgcccgctcggcaccggcaccggcggccctggctacgagttcgacgatgagatcgatccgagcctgaagttcgacaagccgtatctgctggccatggccaacgctggtctacgccgcggtatggacggcaaggtgcacggcaccaacggctcccagttcttcatcaccaccgtgccgaccccgtggttggatggccaccacactatcttcggtgaagttgctgatgacgcttccaagaaggttgtcgacaagctcgaggccgtcgaaaccgatccgatggatcgcccgctcgagccggccgtgatcctctccgtggacgtggctgagtaagacccaccacaaccgacaacaaagccctctgatcgattccaatcagagggcttactcgttcttggctcccctctggaggggagccagagtacggtacggactacttcatcttgcgcatacgcggctcagcggactccttggcaccggtcagacggtacacgtcaaacacgccatcgattttgcgcacggcggccagcagcgtgttgagatgctgcggatcggccatttcgaagctgaactggctggtggccacacggtcggaaccggtggcaatcgttccggagatgatattcacgccatgatcggacagcacgcgtgtcacgtcggacaacaggttgcgacgatccaaagcctcgacctggatcttgaccatgaacagacctttggtgctggtccattcgacctcgaccacgcgctcgggctgcttgttcttcagatcgatcatgttctggcaatcggtacgatgcacggacacgccctgattacgggtgatgaagccgatgatctgatctcccggcaccggcatgcagcaacgagccaatttgacccacacgtcgcccacgcccttgacggacactccggtagagctgctggagctcttacgctcaacaggcttcagaggcagggcttcctgctcaacttcctcatcgacctcgtcggccccggcatccttgaccagatgcgagatgacgttctgcgtggagatctgcccatcaccgatggcggcgaacacagcgtcggcgttcgggaaattgaggtcgtcggccacaccgatcagtgcctcggtggtcagcagcgcattgaccggcaggttacgcttgcgcatagcgcgggtcagttcgtcgcggccttcctcaatggcctcggtacgacgttccttcgagaaccactggcggatcttgtttcgtgccttcgggctcttgacgaagctcagccagtcgcgcgaaggaccggcagtatcggacttggaagtcaggatctccaccgtatcgccgttatcaagcgtggtgtcgagcggcaccaaacgcccgttgacacgcgcgcccatggtgcggtggcccacttcggtatgcacggcataggcgaaatcaaccggtgtggcatgagccggcaaagagacgatcttgcccttcggcgtgaacacatagacctcggacgagccaagatcctctttcaaagagcccaagaattcgttggaatccggggtttcgctggtccaatcggcgagctgctgaatccacttgaggttatcggcctcggacagctcctgattgttcacatcgcgcttgcggtcggacttgtctggcgagctcagggcacgaccggcctggccgttctccttgtacttccagtgcgcggcgataccgaattcggcacgacggtgcatgtcccacgtacggatctggatttcgaccggcttaccgccggggccgaccaccgtggtgtgcaacgactggtacatgttgagcttcggcatggcgatgtaatccttgaaccggccgggaaccggattccaccgcgcatgcacggcaccaagcgccgcatagcagtcctgaatggtatcgacgatgatacgtacacctaccagatcgtagatgttcgcgaaatcatggccacgcacgatcatcttctggtagatggagaagtagtccttcgggcgtccggtgacgtatgccttgatgttctgctcgtccagatcctcattgatctcggccagaatctgcttcaaatacacatcgcgttgaccggcccgacgagccaccaacaccacgatctcgttgtaaatcttcgggtagagcaccttgaagctcagttcctcgagctccgtcttgatggcgttcatacccagacggttggccagcggcgcatacacgtcgagggtttcgcgcgccttcttctgggcggaggtggtcttcacgtatcgccaagtgcgggcgttgtgcacacgatcggcgagcttgaccaccaaggtgcgcacgtcacggctcatggccaccacaagcttgcggatggtttcggcctgggccgaatcacccacttcgagctggctcaacttggtgacgccgtcaaccagacctgccacagtatcgccgaactcggcacggcactgatccagtgtgtagtccgtgtcctccacagtgtcatgcagcagaccggccgccaccacgatcggacccatgcccagatcggcaagaatctgggaaacggccagcggatggatgatgtacggctcgccggacttgcggcgctgaacggaatgctggataacggcacgctgataggcgcgatcgaggatggacaaatcctctccagggtgatgagccttgcacacctgcttgattggttcaagcggattaagcggatcagcactgatctcgcatcccagcttacgggcggcatactgctcgccatcgatctccgacatgccagtcacctccctcatatgacactcattgtagccgtgtatcggggttgactgcgtgttggcaatcgcatccagaccccgcctacggttaaatcaggacgccactcccgtggatccgaatccccgttccgccctgtctgagccgggcaaggtctcggcggggatgaatcgggcttcgacatagcgctggatgaccatctgggcgatgcggtcgcccgggtggaagacggcggtatgctccgggtcgagattgatcagcggcactttgatctcgccacgatatccggcatcgacggtgccgggcgcgttgagcacggtgacgccttgcttggcggcaaggccggagcgcggatggaccagtgccacatatcctgcgggcagggctatagccacaccggtgggaaccagtgcacgctcaaacggtttcagggtcacgtcaacggtggtgatcaggtcggcgccggcgtcgcccgcatgggcgtaatatagccgggccgggtgctcggggtcaaggcttttgaccaggacctcggtggactcaggctcgttgtaggtctcgtcaaacgccatcaggcggcgcactcctcacacaccggctggccatcctcatcggtgtaggcgagctggctgcggtgcttgaccaggaagcactgggagcagatgaactcgtcaccctgcatggggataacggtcaccgaggagtcctcgttgctcagatcggcacccggcagttcgtaatcctcggcaatggcgttctcatcatcgtcgatgtcgctcgaggtattctgcgcggactttcccagagcctgcagcgattcctcgtcctcgtccttgttacggggggaatcataatcctgagccattatggtcctttcgtcgtctaccgttggcgttcgcgcggtttcgccgcgttgtactcgcccataggatacatgatttgaaatacttgtaaagttcgacacgtggggcatactgggaataagtaatgtctttgcgacggaaagtggtgtgcatatgcctaaggatcggctcgagaaggcccgtttcgagcgcgtaagcgaaacgggggacctcgtattctccttgggaggccgtcagttcgccgtcagcttggacgacacgctcgaacgggcgattctcgaggccaagcagattcgcagcgaacagcagcagccggaacagccccatgagcagtccacacttcccatctcgcagatccagtcgctgattcgtgcgggcgccgacccgtcccgcgtggcggaacgctacggactgagcacaacgctggtacggcgtttctccgccgcggtggaaaccgaaaaacagtatgcgatcgaacagttcctgacggtgcccgctccgaaggacagcaaggtgcgcaccatcaatgagctggtcgaacgcactttggcggcggcgtccatcggcatggagtcggtgacctggaaatccacccgccgtgggctggaaccatggcatatcgtggcgattttcacttccgccggacgtgagatccacgccgaatggacctggaacatgcacgacaattccgtggtctgcctgaacaatgccgcacgcaagctgctcggcgagcagaatccgaggaccgagaacgcaggcggcgcaaaggcttcgccggaacctgcgctgccgggcgattccgtccgttcggcgcgtatcgagcgtgccgtgtctgcatgggccgcgccaaagccgtctgctccgcagacccgtccggcgtcctcgaatccggtgacctccaccggctcgatgcctccgatcgatctctccgcctccgggtccatgccgccggtcaagctttccgcaccggtttcgaccggtgccgcgagtacgcagacgccgcccgatgacggccggattccggctgcccaatccgatgccccgatccatgacgaagtcacctccgattccggtgcggcgccagtggaaaccggcaaagccgcaaaaaaggaacagaccgcagcacccgccaaagcagctccggcggaacccgctgcgaagccgtccagaaggaagtcgggacgctcggcggtgcccagctgggatgagattctgttcggcgactgattattcgctatatctggtatagccggatatagccgcctgacgatacgactcttttccccggaatcatatgactatgccatgtcgatatcggtcagacgatatcggtcaggcgacgtcaatcaaacagggaatatccatctccatcatcgtctgcgacccatgcacgctaggcaaatgggtggccttatccccctgagtacgcgaatccacgaatgtggccgcgccggcagcctgtaccatcacgtcgccgaggatcggccgaatacgttccgatacagggccgaacagcccatcggcacatgcctgttccttggtacgcaccaacgccgcgtcccccaagcggtcacgccagcgatcggctatggcgtccggtgattcgccgggttcggcgtacagcatcagagagcgcggctctccccccaccagttccacgccatggatcagcgaaggctccgtcgcgatgtcgagccgctgatccatgtcggtctgcaccatgccatggtcggcgatgatgacgatcaaggtgccggctgacgcgctacgtttcaataatgcaagctgtgcgtcgatgtgttcgaaagccgccacccaatgctcggaatcccagccgtaattgtgccccaccttgtccgcgtcacggatatacagataggtcaggccgggcctcctggcggcgcgtgctgcggcgagcacgcgatcacgcggggtgacattggcctgataatcagtgccgcgcaaggccgcctcggtcagtggagagccggcaaatttgggcagtccggaactggtgacgcgcacctcctgacggcgaagcttctcgaacacggtctgttcacgttgcaaatcatgaggatcgaccatgggaggggtggtgattcttggattgacgggtttgggcgccagtgcatccttgaattggatgagttggatgagcttgtggttgttcggctccagctgcgtgtatccggccataccggtcaatcccgggcaggtgccggtgccgaacgtggccatggcggccacggtggtgctgggtgcgcaggtcgcgatgggacgctggttggcgctctcgttcatcagcgagcgcaggtagggtgcatggccgaggcgcatggcgagattccagtagccaagtccgtccacgagcaccacgatggccgatgtggcgtcaggcagtccgagggcttttttgcaggcttgaggatcggtgtggaccttggtcgagatcggatgaccaatggcggcggaaagagccggcaatacggcggaaaggtgcagcgctcccccacggcccgcagctgtgtccccataagtcactgtgggcaccaaccgcagcaattcgtccatatccggcgtctcaacactcataattgctcattataaggctcacagaaaaccgtgccccattgcaaaagtgtgagccaaacgcacaatatcaatcaatcgcacataggtcattgtgctgaagttccgccatttttcgtcgtcttatgtgcgattggactggccgagcactcacacttttcctattgagaaccattcgctgcgcgccgtttcgcgacctgacgctaatatagggcgagttcgaaagggagtttcatggcatcacaccgcaaaccgtccgcgcaaacctatgatccgcgtacggtcaaggagcatatcgtcgagacgccgctgaacgaggagatgagcaagtccttcctcgaatatgcgtattcggtgatctacgcgcgagccctgcccgatgcgcgcgacggcctgaagccggtgcagcgccgcatcgtctaccagatgggcgagatgaacctgacccccgaccgcccgtacatgaagtccgcccgcgtggtgggcgaggtgatgggcaagctccacccgcacggtgattccgcaatctacgaggccatggtgcgtttggcccagccattcgcgatgcgtttgccgctggtggacggccacggtaacttcggttccttggacgacggcccggcagcctcccgttataccgaggctcgactcggcccggcagctctcggcatgaacgcggatatcgacgaagacaccgttgacttcacgccgaactacgacaacaagctcaaagagccgaccgtattgccggccgcaattccgaacctgctggtcaacggcggttcgggcatcgccgtaggcatggccaccaatctggccacgcataatctcggcgaagtggtgaatgctgcaaagttcctcatggctcacccggatgccacgcttgaacagctgatgcgctatgttccgggccccgactggcccaccggaggtacgatcatcggccgcgacggcattcgcgaggcctacgccaccggccgaggcacgctcaccacgcgcgccgccacccatatcgagcatgtcacggcccgcaagcaggccatcgtggtcaccgagctgccgtacatggtaggtccggaaaaggtgatcgagcgtatttccgacggtgtgaagaaccgcaagctggagggtatctccggcgcgttcgacctgaccgatcgtcataacggcacacgtatcgtcatcgagatcaagaccggtttcgatccgcatgcggtgctcgtccagctgttcaagcacacgccgttgcaggacaacttcgccatgaataacgtggcgttggtggacggccgtccgcacacgatgggcttgaaagagatgctgcaggtatgggttgatcaccgtcgcgtggtgattcgccgccgtagcgaataccgcaagaagaaagccctggaacgcctgcacctggtcgagggactactcctggccatgctggacatcgacgaggtgatccaggtgatccgcacttcggatgatgcggatgccgcgaagacccgtttgatggccgtattcgatctagacgaggtccaggcccagtacattctggatctgcgtctgcgccgactgaccaagatgaaccgcatcgaacttgaggccgagcgtgacgatttgaagaagcgcatcgaggagctcacccgcattctggcctccgccgaagcgctcgaccatgtggtcaccagcgaaatggatgaggccgtcgacaagtggggatcgccgcgtcgcaccgtgctgttggacgccgatcccgacggcacgttgacgccggtcgtggcacagggttccggcacttccggaatttcgaaatccgcgctggaggctgtgaagtccgccaccaccatttcctccgccgaggccgatgtggctgccgccgctgcggccgccaagaagaccggcgaacagtccgctttgaccggagccctgaagatcgaggacgagccgtgcgtggtgatgatgagcgctacgggcctgatcgcccgtaccacgccgagcgccatggatgtgttcaactcacgttccgcgtccgacgaacgtctgcacgatgatcaaatcaccacgattttccggacttccacccgcgccacctatggtctggtcacctcggccggacgcctggtgctggcacatgtggtcgatctgccggccttgccggcgtccgccacgctttctctgcagggcggagtccaggccgacgacctgatcagcatgaccgaatccaccgaccccgtacgcggggaacgagtggtgaccgcaatcgccatggagcagtcggccgataacggcgaaaacggcggcgacggcgaaaccacggcggaggccaagccgctgccgtcgctggccatcggcacccgcaacggtgtggtcaagcgttggaaccgagaagctcctaccaccatggattcctggccggtcatcgacgtgaaggacggggacgaagtggtgttcgccgccgtggctgaggatgacgaccgtctggtgttcgtttcctctgattcctcgctactcaccttcgatgcgaagaacgtgcgcccgcagggccgcacggccggcggcatggccggcatcaagctcgccgagggtgctcatgtgatggccttcaatgtggtgcccgccggcaaggtggcttggacctacgaggaaggcgagaacggtctgacttcgggtgcgggcgcggtggtgctcaccgtggccggggatgaggatgctctgcccggtaccgaaaacggcgccgccaaggtgactccgctggagatgtatcccaccaagggtcgtgccaccggtggcgtgcgttcccagcgcttcctcaagggccagaacacgctgattctcgcctgggtgggcccctatccgttgcacgcctccacatccgccggctccccggtcgagcttcccaaacccgacatgcgccgcgacggttccggcgtggacctcgcatcccccatcgcgtttattgcataggaatgctcacaatgaggcggggccaccgtttctggttccgcctcataacttttccaaattcaacgcagtaagtgacaacccggtttattacggccgaatcacacgccccatacgttccgcaatcaggccggcgatgacatcgtatccccgctgatttggatgaatggtgttgccgtacagtacccttcgctgattgaaactcgacgcataatcgaggaatctccagcctttgtcctggcacatccgttggtagcgttcgtttagttgctcgaccgcgtggttcaattccataagagtcctcatgttgaaacgagtcatgattggctgttcgagcgcgaattccgggacggaaagaatagtaacgtccagtctcggctgaagcgcaatagactcttctatgattcccctcatccgagctgccacggtccatatgtctgatagtcgacagtgctggcaccgcaatatccgcagttgacgacgttgatgcccagtcgttcccccacttgctcgggccatggacggtgaacagcctaccggcgactttgatattcaattcgccttccctgatgtaggcaagcatgaaattatccactgatcggtgacgaagcgaatagccaggaagatatgacagagagccggcaatcaaaggatacaggaatgtatcctttacctcattgttcggggaggccagataataagtcgattccgtggaatcaaatcctgagccgctcattctcatgaatatgagtgtatcagcgtctcatcaatcgtactggatcgttctgccgcaatgattctgacagatactgcgttttctcattatgagcgcaatggtatgcctgccatacggagtttatgcaagagtggggtacgcttcatcacttcgtcgaatccgaaacgcacgatggcactgactccgcctcgcttcagaccttcttcgcgaatgcgctcgtcagcaacgacttctctcacacctttgttatccgtcatttctgggtcgacgtatttgcgggtcccatcatattcgcccacgatcatgcgaccatcttcaagccgccacagaaaatcaacacgatatgccatgccggtttgggggtcgataatggtctgctgtaattcgggaatcttgtatccgccttcgaggatggtgccacgtgtcaatgattcgccgccattttcactggtaggatcagcataatgcaacaaccgcagcgccgcagtgcaatcgcgttgcatactggcgcatatgccgatgatgtcgttaatagcaacgccccgacgcaatgccgagtcgacaatgggcagtgcatagcggaattcaagagtcagcgcgcaatccaccactgttcgtgcttcactggtcacggcaacaccatcaatatgccgtatatccgtctgctggcttttcggtatgaacaatcgccgtattcgtccgttaccggtatcacttccctgagtatgtgtggcaatggttattgtgccgtcatgcagtaaccattgatgttcgaacccgtgaagatttgcggcggtcagaccggcaaacacccagtgaccatggcggagtcccaatgtgcgcgcaatatgagcggacttctcggcagggttcagcgacttccaaaagtcaggtttcacaaacaggccggggaatacccgttcaagctcctgtgcagaagcccgtctttccaatgcgcttcgctctgctttggttctgccgaatgcacaacgacgctcctgttgcgacacttccaataatgtttccactgctttgtgatgcttcataatatcgacgatatgcaatgatgcactattccagaaacccgaacaggtaatgtggttccagcttcctttggtcccgtctggttatccgacgaagacaatatctcataccgtttttgcaatatggcagtgtcggtttttctcaaatcgctcacgcccggatgcattcgttatcgtctttcccctgcaactaattcgcaattcgtgactggacgaaatccatcatcttttgttgatcgtatccgaccgaagtccaccacccggtgccgatctcgattcatttgcgatcatttcaatagagcggaacagagaggtatcgcagttttgccctgctaagctcacttcatcgaggcgaatcggatatcccaaccacgaaattcccctcatgggaaatccaaacgaggcaacaccaagatggcagtcgtactattgccccgttccagataccttatcgaggccctgataaggctggaatcacgaaattgccctactgacgacatctaagcaaggcaacggcaagagagctatcaacattctgcctcgctcactcatctcagcaaagcaattccaagaccgccatcacggtgcaaccccactaaagccataccaacaagacgattccaagaccgccatcatggcattgccccgctgaagtcatcccaacagggacaatcccaaaaccgctatcacgatgccactccactaaggctttttggcgaagtgacacccagaccgccatcgcaatgtcgccccgctgagcccgccatggagagatacaatcctcgacaaaataatgcacgatgccataattcccacgacaatgcggcgtagtagaccgcatgcatccatccagcacagccgcataccccaatgcgaccacatgatgtctcagtacaaccgcataccttgtggcacggggatgaatccggcctgatgaagaatgcgggcgaagggatgtcgggcattgagaggctcgccgttcatatcgctgaaagttacggtgccattgccgctgcgcttgagggcatatgcgagttctgtggccgccttgcgtaactgttcatcattcgtcatgccgagatcaggggaagtctcaaaagctgactcggtagaagagacaccaccctcagtcagcccattagacgctgcaccagtttcaatcgacccagcagaaacgacaccgacatcggcagatcgctggaatgcggtcaaatgcttggctttggcggctgcatagagcaacgcaccttgcggcccaagtacgactacagctccggcacggcgtacaggcctgcctgcacttactggcacatcaggccaaccgattgccgaaccactgaggttcgcgggatcaagtacgctcacggccaccacggattggctgcgatgctccgacggatgtctcagcgcatccaccgtgtcgctttcggcgaattgcgccgcgccgaagccatgtatgaacatgccacgcaccagtcgtccatgttcctccatgcgtttcaatatcggatagacggccgaataaccacccgggatatcttccttgtcgatcagcggctgtgcaatcacgccgtagcggtccaacaatgcttcgactaatgcgagcgcacgctccgtcgactcgtcctcccccataccgggaacagccgaccataggccgcccaacgtcatatccgcagaggcacgacgaattggtgtcacgcgaccgcggcgacgcgaagtcgaagccttgcgagagccaccagttcccgcagtcagcgcacgcacaggtgcaaaactggaattgctgattctgccttgccacaccagactccacaaggcgtccttgaattgccgttcgctccacacctgcgggataatctcgccggtatctgggttgatgtccggctcggaggtctcattccagatgcgcttggcggcatctgccagctgacgggcatgaaatgcgccgcccgaagtcaacgccgtcattatcgattcaggcatggtctcgctatcgccatcagccgatgcatccggcttggagtcgaaccgtccggaggatgcggcacctgccgaaagttccgaggcctcggtatcgccaagcagtaccgaatccgcgggatggaaggcgatatctccgggctccaaggcaccggtgccgccggctttggaccccacccacaccacatcgccaccggtaagaagttcgtccagcatcgacggttgatagtcacgcacgcgagcggggaatatcgcggtctcccagagaccagccggcagcgcgacaccctccagctgctcgatgacacgcatgagcccatccgcaccctcgtatcgctcaccgccgaccggaccgatgccctgcctgtcgataaggaacatttggaaggcttccggttccactggccgcactgccttgcgtgccttgtccaatgaccgcgaacgaatacgacggaacacgtccttatgaagccattgctgttcgctcccgccggcgggagccgtcgacggagtcgactgagggcaacccttctccggatatggaccaccctcagtccgcttcgcatccagctcccgccagcgggagcatgaagtggagtccacgaaatgaccttggagaaggtcccctttggcggccaactcgtccaatgcatgtacgacgcttgcggcgtcaagatgcaggtaggcgatgatctgatctgcggtgaacggaccatgggttttcgcgtaacgggtcactcgcccggtcacgtcatcggcggcaagttcgttccagaaagtccgcttctccagctcctgctcaacttctcggatcacatcaggattgagcaccttggccatgtcggtggtgccgagcagtcgctcaagcatctgcgagtccagggacagcagttgtgtgctgcgctcggcctgaggctgatcgtattggtacatcaccgtgcccacgaagccgaagaggatattctcggcgaacggcgaaggcgactcggtttccacgtccttcaaggcgatggttccggagtgcaatccggtcatcacctcgttcagtgcgggcatgtcgtagacgtcctgcaggcattcgcgcgcggtctccagaagcagcggaaagtttttgaccgtgcgtgcggattgcaggagttgtgcgccacgaagacgctgttgccagagcggcacacgacgaccaggatcggagcggggcatgaacagtgagcgtgcggcgcattcgcggaatctcgaggtgaacaacacggattcgcccacttggcgttccacgtccgccctgagatcttcagggtcgaacaggaataggtcacacgcgagaatgtgtccgtcgccttccggcaactgcagtacgatgccgtcatcagcggcatatacctgaccgtcaaatccatagcgttggctgagtctgcgactgatggccatagaccagggttcgtggacgcgacggccgaacgggcttaagagcacaatgcgccagccaccatcttcatctcgggtacgttccacgataagggtccgatcactggggaccgcaccggtggcggcccgttgttcggaaagtagacgggcgaggttggcgatggcgttagagtcgagaccatcttgatggaggcgggtgaggattgcgtgggtgaaggtcggagtgctcctcccctcagtccgctccgcggacagctcccctcggagagggaagccagaatagccaccttgctccatcaccaatccgtcggcgatttcacgggtgaagcgggctatggcgcggctgaaaccgtagtcacgtccagctccctcaccatgccagaacggcagtcgggcggttcgtccgggcgccggggtgacgaccacacggtcgcgcgtaatgtcctgaatctgccatgtggaggtgccgagtgtgatcacatcgccgacacgcgattcatagaccatctcctcatcgagttcgcccacacggcgctgccctttgccggcatccacctcaggcaataccacggtgtacaggcctcgatcaggaatcgtaccgcctgaagtgaccgccactttctgcgagccgggacgtgccgagataagaccgttatcccgattccacaccagtcgcggccggaaggcggagaactcctcggtgttgtattcgccggacatcatgccgatcaccgcgtcgaacatgtcacgcggcaaatcggcaaacggtgccgaccggcgcacggtgacataccagtcgtccgctttgaggtcatgcatcacagcggcggccacggtctgctgggcaagtacatcaagcggattcttcaatacggcaagcggctcgatatcgccggcgatcatggactccagactggcggcgccggtaacgatctgctggcgggtcaacggatagaacaacgcatgcgagacaccgcccacctgatggtcggcacggcccacccgctgcaaacccgaggaaacagacagtggcgtgtcaatctgaatcaccagatcgaccgaacccatatcaatgcccagttctaagctcgaggtggccaccacacaacgcaattcgccgcgtttgagccgttcctcgatcatctttcgtcgctctttggagaccgaaccatggtgggccatggcgatgacgtcatcgccttcatgcgagccgaccagcatggtggtggaaccgaccaccgcatcataatgcgaggcgaaaccctcacggccttcgggcgaccccatgtcccgcaccaagtcgggatcgacttcatgccgggtttgtgcataaaggtcattgagccgcgcagtgagcttctcggccacgccacgcgaattgacgaacaccaacgtggtgcgatgtgccagaatctcatcaagcacgctgcgttccacaaccggccagatggagccagaagtccggtctccggccgcaccgaccagcacagcggagtcaaaggcgccgcctgtcgtacgctcgcccgacaacagggcgccatctccaccagcaccggcttcgccgccgaccagcacgccattcccacccgcagacaaaccggaatcgcccgtttgcgcgattcccttgcgctccgccaaccgttgcatggccggcgtaacaccgctgatatgcggagtcggacgttcggagtccacgccgccgacgcgctgcttggcgttcacagattgcagatcgcgcatgttttccagtggttcgaccatacgcagatccatcgcgggcctgccgccgggattcacgatggtaaccggtctgccgcctgtcagaaaacgtgcggcttcttcgggcggattgaccgtggcggacagcccgatacgctgcagaagaggttcattaccggaatcatccgaaactttggattcgccgtcattgcggtccatcgcgtcgcgtctgcgcgattcggcgaccaggttttccaaccgttcaaggctcaatgccagatgcgaaccacgcttggtaccggccaccgcatgaatctcatcgacgattaccgtgtcgacggtgccgagaatccgcccggccttggaagtgagcagcagatagagcgattcgggcgtggtgacaaggatgtccggcggatgggaggcgatgcgccgacgctcctgagcagtggtgtcgccggaccggttggcaaccgcgattttcggcgcgggcagcccctgcgcctcacattgcgcagcgataccctccaacggctgttcgaggtttttggccacgtcgactgcgagcgccttcaatggcgaaacatacagcacacgcacgcccgcacgccgcgtacgagacacggtcatcagccggtcaatggcggaaagaaacgcggccaatgttttaccggagccagtaggagcgatgaccaatacgttccgtccggaatggatcgccggccatgcctgagcctgtgcctcggtcggctgaccgaaggcatgttcgaaccacgctttggtaggttcagaaaacagactcaagctttcgcacatatgttcgattgtagcgatgcggggaaacatcgtgaagattccggttgggagtccattgctcgcaggcggggcctgcgcatctctccctcgcccgcttcacgggagcccctcgtcagagagggggcaaagggaatcacatcacgaccgccccttgtgaggaatcggtcttatcacagaggggaaccgatcgggtctcagctgaagtatgcgatgacctcgtcggcggtgccgtaggcgctttgggcgccgatcttcgcggcggcataggcggaaacataggagccgatctgcgcggactgcagcagcgtatagccggcggcaagccccgcaagcacggtgcccatgaacgagtcgccgcaaccggtggtgtccaccgccttgacttgcgctgcagacacacgatgccaacggccgttttcgatcaccacggaaccggatgcaccaagcgtcacgatggcgcggtcaaagccgtaatccgtgaatcgttcggcgacttcataccagtcgagcgactccacatcgccgtccggcagccccaacagctgggccacttcatgctgattgaccagcaggatatcggtaacctccaccagttcatggggcagctcgtccatgaacggcgagtcgttgagcagcacagtcacaccggcgtcatgcgcagtctgagcggcggcgaccacggtgggaatcgggctttccaggcacagtcccagcaccgagcaaccggcgatggtcaatcgatgcgactgcacatagcccgcagccgccttggaattggctcccggagaatagacgatggtgttctctccctcggcactgacggtgatcaccgtggtgccgctggggccttcgacatgcaggatatcggcggtgccaacgccggcctcgtccagtttgctcagcaggaaatccgcattggcatcgtcgcccactgcacccagcagctggacgttcaagccgagacgggctgcagcggacgcctgatttgcacccttgccgccgggcatcaccttcatggcaccgccctggacggtctcgcccggcttgggcagtcgtttagtcgtcactgtgtaatcggcattcatcgaaccaattacgattaccgagccctgcgcatccttcagcgcttccagtcgttcccgtacgggctccggcatctgttcatgttcttcttcacttatcaccatgggctacaagcatagtaagcggagagcccaaacgtgcacacggtcagccgcgcagcttgcgcagacgctcatgcatagccaccatgagcaccaacagcaccagcaaataccatggatacaggctgatggtcacatactgcgcgatgacgccgaatagcggcggcatcagcagcgatcccacataggcacaggccatctgcacgccgacaatggcctgggaattatcctcgccgaagtagacgggagtcgaatgaatcacgcatgggtatatgggcgcacagccgaggcctacgataatcagccccgcaaccacaccaagatgatgcggcaacggcacaaacataacgaggataccggccaataccagtacctggccgaggcggatcataaccgggtccttgaatcgcatggtcaggaagccggaaagcgcgcggcccacagtaatgcctacatagaataggctggcccagctggcggcggtgatcttatcgatgccgctgtgcatcaccatgtagctggaggcccatagaccagccgtggattcgatggcgcagtagcagaagaacatcacgaggatttctttggcgccgcgtatggccagtacaccggcaacgccaaggggtttacgctcggcgaccgtctctccatcagtgttttcgtccgactgcgcggtttcgccggatgattcgccggctgcggcaataccacgcttcttccacaacggcaggctgaacaccaaaatgacggtcagcatcacttgcaggatggcgatgtaccgataaccccatggccagccttggccttgcgaaagcgcatagcccataatgtacggccccaccgatgcgccgacgccccacatgcagtgcaaccagctcatatgccggctttcgtaatgaatggcaacgtagttgttcaacgccgcatcaacgccgcctgcgccaagaccgtatggtatggcaatcagcaacaacacccagtaattcggggcgacggagaagccggccaaggccattgcggtcagcgccacggaaactgcagtgactttgcccgcgccgaatttcaacgtcatacggtccgagagcaacgccgagacgatggtaaacatggaaatcaccgcggaaatgccgcccgcccaagataccggcacgttcagatcttggctcatggtgggccatgccgaccccagcagggaatccggcaaccccaagctgataaacgccacgtagatgacggcaagcagcagactggccataacccacttcctatcccatagacgacactggctgtaataacgatgtcatcagtctatcgaataactcatgggcaacacgcataaaacatatgacaacgtgctcacctcaaacgccaattacggaaattctcggtaagcacgatgtcattatcagcgacgtcttcgatcaggtatcgatcttggaacggtcgaagtcatcggcgttatccacgatgaactgtttgcgaggcggcacttcatcacccatcaacagattgaagatctcggaagcctgggcggcgtcttccatgcgaatgcggcgcagcatgcgcgtgcgcggatccatggtggtgtctgccagctgatcggcatccatttcgccgagacccttgtaccgctgaatatcatcgttgtagccgatgcgcttcttatcgaggtcggccagtttgccggccaattcgtcatcggaatacgtgtagatgtattcgcccttatgcgagccggtcagcgcgatacggtgcagcggaggcacggccgcatacacgtaaccatgttcgataagcgggcgcatataccggtaaaacaacgtcagcagcagaatacgaatgtgcgcgccatccacatcagcatcagtcatcatgatgatcttgtgataacgcgactgttcgatgtcgaagctttggcccgaaccagcgcccaccacctggatgatggccgcgcattccttattggacagcatctgtgtgatcgaggccttctgcacgttcaagatcttgcctcgaatcggcagcagcgcctggaagccggcgttgcgggcggccttggcggtaccgagtgcggaatcaccttcgacgatgaacagttcggccacgtcgtcgttgcccggctggcagtcggacagcttggccggcatggaagcggattcgagcgcgttcttgcggcgcgtgacctctttggccttgcgcgactggatacgcgcgtgcatctcgccgacgatcttctccagcacgcgggcggactgctccttgtagccgcgcttggaaccggtgatcatctcgccgaactgcttgtcggtgagcctggtgacgatcggcttgacctgcgcggtaccaagcacatccttggtctgcccctggaactgcggttctgccacacgtgcggtgaccacggccacgagcccggcctggatgtcgtcacgctccaccttcatggcggagtccttgaggttcaccttgagcttgcgggcgttgtcttccacggccttgcgaatctgcttggtgatagcattcatgaagccgtccacgtgcataccgccgccaggcgtctccacgatgttcacgaaactcatgatcgtggtgtcgtaaccattcacccaacgcagggcgatgtctacgccgcaagtgcgttcgatctcctgggcatgcagttcgccgccctcgcccacggcctgggtctcttccttgtaggtgccctcaccctgaatgcgccagatatcggagatgggctcgcctttggacaggaagtccacgaaatccttgacgccaccggtgtgcaggaattcgaccgtacgcggatgggcaggctgttcgccgaaagcgccatcaaccacctcagtggcggatgacagcgagaaatcctcctcgtccggagcctcggtatcgccgtcgacagacgcatcgtccggaagctcggcgaatccgtcaagtggggagtcttcgccggagaatgactcggttgcgttagccgtttcgttcgcattcagtgattcggctacgactgcgacatcttcgttgggctcagtgccgaccgtatcggccccgttggttttcggcacattctcatcgacgatggtgattttaagaccgggcactaggaaactggtctgacgcacacggtcgatgagctgctcatatgagaattcagcagttttattgaatatttccggatcgtaccagtaacgaatgcgggttccggtggtcttgggcgaaaccttgccgatgatttccagctcggtgggcttgttcttacgggtacgtttgaacggcgagtccggagatgggttggctggatcagcgtctgcgtatacgccgggatgcccttgatggaaggccatgtgatgggttttgccgtcacgatcgacttccacatcaagacgggaactcaatgcgttgaccacagaagagcccacaccgtgtaggccaccgaccgcgttataggacgaattgccgaacttggcgcccgcgtgcagcttggtcaggacaacttccacgccggatagcccggttttcggttccttatcgaccggaatgcctcggccgttgtctgcgacttccaccgatccatcagtgtgcagagtaacgacaatgttgttgcaaaaaccggccaacgcctcatcgacggagttgtcgatgatctcccacaggcagtgcataagaccctgcgagtccgtggtaccgatgtacatacccggacgcttgcgtaccgcgtccagaccctcaaggacggataaatccttagcgccgtattcttctttgggcatacagtcctattttctaataatttggctcccctcttcaggggagccttcaacggatggctccgtcgtttgacagccctgtgggctgtcaaactcctcgcgcagtcggcctgctaagcgggccgaccgtcattgatccaggaagtcgcgcagggtctgcgaacgggacgggtggcgcaacttggacatggtcttggattcgatctggcggatacgctctcgggtcacgccatatacacggccaatatcgtccaaggtcttcggctggccgtcctccaaaccgtaacgcatcttgatcacaccggcctcacgcggagacagggtttccagcacctgcttgaactgctcctgcagcagggagaacgctactgcatcggacggagcaatggcatcggtatcctcgatgagatcgccgaactcggaatcgccgtcctcaccgagcggggtgtgcagggaaatcggctcgcggccgtacttctgcacttcctgcaccttttcgaccggcatgtccagctcacgggccagctcgtccggcgtaggctcacggcccagatcctgcagcatctggcgctgcacacggctcagcttgttgatcacttcgaccatgtgcacgggcacacgaatggtacgggcctgatcggccatagcacgggtaatggcctgacgaatccaccacgtggcgtaggtggagaacttgaagcccttcttccaatcgaacttctcgacggcacgaatcagaccaaggttgccttcctgaatcaaatcgaggaacagcatgccgcggccggtatagcgcttggcaagcgagaccacgagtcgcaggttggcctccagcagatgatccttggcctttttgccgtcggcggcggcccacttgagttcacgcttgcgcttgaactccatgccttcactttcggtatcgagcagatgctgggcgtacaggccggcctcgatgcgctcggacaggtcaacttcctgttcggcgttcaacaggctgacgcgaccaatctgcttgaggtagtccttgaccgggtcggcggtggcgcctgccgcaatcacacgacgcttcggattgccggcggggatgatgttctcttcttcatcatccgtgtcggaaaccacataagcacccttttccttgggctgctcaggagccttcgatgcggccttgccttcgtcttcctcgtcttcgtcatcctcatcgtcaatgtcttcgtcgtccgactcggcatcggcatcttcaagatcatcgacgtcctcggattcgacgtcgtcaagatcctcatcaaggttatcgacgtcaagatcttccgggtcatcgctttggctgatgtcgttctgaggaagctcctcctctttcttgaccttcttggccgaagtcttacgtgaagtcttctcaccggtcttggcagccgtggtgcccttcgtgtccttggtcttcttggcggaggtcttacgcgcggtggtagagctggccttcttcttggtctcggtctcctcgctggactcggctgtctgcttggttgccgtcgtttccttcgtggccaaaactgctcctcctgatctcttgcctcgcagtgcgcataccacatgggcacacttctggcaagggcaaatcgtcaactatgtgagtaaaccaccctccacggacgattattcccatatcgaacaaggttcatgtcactgtccgagcacgccactcttcacaccgccccttcaaggcacagccgattacaccattttgagccctctaccccgagcaccaagccggcgccacaccccgctgcgcagcggaaaacaccatggccgccagagaacattcctcatcgagcaataggcactgcagggccatggtcaccgctcgggaatcgcccaaccaccataaggtgtaggccaccacagccagtggctgtacacaatatggcactggcgccgcatcggctatatcgagaagcatggcaatgcctgcatggcagcgttccttatctggcacgatgccctcgtcctcgaaagccacagtcagcaattcgcccatacgacgcttattccgtttgctgtgcggccgtgcggcaaattccataagttgcgttttggggcatcgttgttcgtcaataatcagggagagaatcagggcatcgcgtatcgagagcgtttcattcatgccgaccgcgaacgcagccatagtgtcacgatccaataccgtctccccgctgtccagattgaccagccactcatccagtggatccgacatccagtcggtatctgcctgctgcggaccaagcgtctgcctggtctcatggaacaaacgagaaagttcctccaaggcatcggcatcaaaatgattagatttggattccgcatgtttgcgggttttccgtttcgcgttcatcatgtcctcctcgacgtgatttccatgcctcacaattaaggctttatcttgtgtgcgcccgctcgaatgggcgtatgcccactatgcatgagcggcgccgtaaaccgggcaaaaatcgacctttgtggttccagcttcgcaacccccgatttttcaacgttcttgtgttcttcataacctgtggataagttattagtcatgtggacaactgctgacgaccttgcaatcatcgaaccgcgcatcatacagctggtgcgtgagctgactgccgcccctgataccgatgaggtatccgacgccttgaaacccgtgatggcacaggtcgtcgatcaggccgcagcctccagccagggaggcaaacgactgcgggcgttgctgaccttggatgccttcgatgctctgatggcccagaccggcagctctactcctgatatgcgtgacgccatgactgatctcgcgtgtgccatagaagtatttcagaccgctgccctggtgcatgacgacatcatcgacgaatccgatttgcgccgcggcaaaccgtccgcgcaccgtgctcttgaacaggctgtgcacagtggcgccatcggccacgggcttggtctgatgcttggagacattctggccaccgcatgcatcgaaatcgcgcgccgggccgcgcgccgtcttgacaacaccgacgccatcaacgaagcatttctgaccatgcaacgcgaagtggaaattggccaggtactggatctcgctgtagaattaacgccactcgaagacccggatgcgttggtagatgcctcgctgaacgtcttccggtggaaaaccgcaagctacaccaccattgcaccgttgctgttcgctctgctggcagccggcgctgaccccgctgaagcatggcagcaggcattggcggtcggacggcctcttggtctggctttccagcttgccgacgatcttctggatgttgtcggttccagccggaataccggcaaaccagtgggcggcgatatccgagaaggcaagcgcacggtgctgctggccgacgcactggccgcagcgggtacgcaggaccggcaacaacttatcgatttgtttgagtccgacgctcgcactgatgatcaggtggcatttgtcatcgcgctgttccaatcaactggagccgtcgaacgttcccgcaatcgtattcacgccttgtggctggaatcccgcgcagcaatcgccaatctcaatctggaacccgaggccgaaaaccatctgattgcagcatgtgcacggttcgttcccgaaaatcttcgttaggtttcgccgggcaaaacacccgtgaaaactatgcgtccgcgtttccaaagcgtagccagtgccatgtagactaaacggtgttcagtcttatcaaaggaaccgtgcagtacaaccatgagtgagaacgagcccacacagatgattgagggacgctaccgcatcgtgcgcaatatcgccgaaggcggcatggccaccgtgtatgaggcggtcgatgagcgtttgggccgtactgtggcgatcaaggtcatgcacacgcagctggcacagggaccgcatcgagatcagttcgtggagcggttccgccgtgaagccaattcagccgcggccatcgcaaatccgcatatcgttcaggtttacgacaccggtgagttcaatggccttgattttttggttatggaatatgtgcatggcgtcaatctgcgccatgagatgaacgttcaaggcacattctccgtccgcgagacactgcgcgttatcgcggaaacgttggacggcttggcttcggcacatcgtgcgggcgtggtgcatcgtgatatcaaacccgaaaacatcctgatcaacgatcgcggccacgttcaaatcactgattttggtctggccaaggccgccagccaagcaacgctgagttccaccggcatgctgttgggcactgcggcctatctggctcctgaaatgatcgagaataatcaggccaccccacaaggcgatttgtattccgtgggcatcatggcttgggagatgcttgccggcaaggtgccgttcgattccgataatccggtcacgctcgtgttcaagcatgttcatgaggatgtcccatccataaccactgtctgcccggatatcgacctatccgtggcctcgttcattgcgcacctgactgcccgccaggtcgaggctcgtcctgcgaacggctccgaggccgcccaggaatttcgccagttggctgccaaactccctatggaggcatggcaatatcgtttgcatgtcgagtctgcggatgccgccagaaccgatgctaccgcaccggctttggttggcggactggtttcgccggagaccgctcctaggcagagctctgacacgcccccggagcctcccaccgccccgaccaccgctttcgatgcgtcttccacacgagaagaccttacgcaagtcatgcccaaccccggtaatgagacaacgattctggcaaagaccggggatgatttcgaccaggtgctcgccgctgaagacgatgccggaagccccgatgccaagccaacggacggaaagcgcaacaagaagccgctcatcatcgccttggtgattgttctgatactggctgtagctgccggaaccggtgcatggtggtggttcgcgggtcccggcagctattggagtgtgcccaagcccgatgacgtgacgtgtaaggagaacaccgagtgctcgttgtccggtgctgactgggccacgtatgagagcacgctgaaggtggcaggaatcccctataaggccgagaagcagtacagcgacgacatcgccgaaggcaagatcgtctccgcctcggtgagtgaaaacaacgctgttgtaggcagtcacgtcagcaagcgtcacaatcagcaactgacggtgacggtctcgcagggtgtacacatggtcaccattccgcacgatgtcctcgatacgaattccgcgaacggcaaggaccctctgtccgcgttgaagaaagcgggcttcgacaacatcaagcacgatgattcgaaggacgagtattcgctggataagccggaaggcgcagcgctcagcataagtcccgaccccggcaccacgatcaagcacaatgatgaagtgacagtgacgctcagcaagggtcccatgcctgtcagcatgcctgacgtagtcgacaaaaccaaggatgagatgcaagcggcattcgatgagctcaagctcaccgccaacatcaccgaacaattcgacgacaagattgccgcaggcgaggtcatctccgcttcccaagacgctggcgcgcagctcaaatggggcgacagcgtagacgtggtggtatccaagggacctgagaccacggtgatgccgaatgtggtgggtcagcagtatgacgcggcagccgcacagctgaagaagctgggcttcactgtcaagaaatccgcaccgctgggcgacattacccatgtggtgcgtatccagagtcccaatgccggagaaacggtgcgtctacgcgacgaaaacggcactccaaccgttatcacgttgactgtggtgtgagttccccgtcagcacccctgagcgaagccgactgaggggagcttggtagaagtaatccaccaagctcccctcagtctcactgcattcggcagctcccctcggaggggagccaagatattattccgccacttcttcagcggccttctgggctttcagctcttccttgactttctgggcgtactcgttcacgtactcctggccgctcatcttctggatttccgcggaaatacggtcggtcagcgagcgcaaatcgtcatgggtgatctcgtcggcggtcttcttctcaacctcgatcggcttaccgtaaatcacctgcgtcttgcctttggctggaatcaccgtgcccggcttctgcagttcgcgcgaaccgataatagcggtcggtacaatcggacaaccggtttcaagcgcaagccgtgccacaccggtgtgccccttgtacatgcgaccatccgggcttcgcgtgccctcaatgtggatgccgaacaggtgtccatcttcgataatctcacgtgcgtgctccagagcaccaagcgacttgttgccaccggaacggtccacggggaacacgcccacggaagtgaaccaccacttcttgaacttgcccttcagccccttgccttcaaagtattcggccttgcccatgaagtgcaccatacgcgggcaggtaatcggaatcagcgcatcatcgatgacggccagatgattcgcggcaatgatggcaccgccggtgcgaggcacattattgagccccgatgcggtgggtccaagacgatgacgcgcgatgggtccaagaaccttgacgaagaaccagtagagcacttagcattcctccctcaaacggactggctattggccggccgcgtgattagagtgacagttatgactgacaaccagaatagcaatgtcgacggagagcagccaatccccacgccgggcaatggacgagattcggccacgcccgcggatccgcaaaaggcaaccgataccggacataacgccaacggcaacggctccatgccgtccggaaagcatgacataggcaatctggatgacgcttgggcggcgttcgaggccgagcaccaagccgatttaaacgacgtggcatcctcccgtcaggccaagaagttcgagaagcaagccaagaaacgagagaaggaagcattgctttcagtggatgatcttgacattggctcgttcaccgatgacgcacgcccagaccgaggccgtaagggtggtccgcgcgatttcaccggttccagctggttggacaccgataatgtcatggatacctatgatgacggcggcttcactcccccgaacccggatctcgggccggtcaaggcatctacggtgctgttggtggcgttgctcatcatcggtcttgtcggcgagacggtgatgatattcgttcccggattaaacgcgattcccctattgggcgcactgctcaatattctcttcgggttgggcgtcattctgggattgggcggactggtcgccaagatcctcaaccgcaaagaccgtcccggcgaccaaggcggctactacgactacggagcacgcgtatagcgctctcaaggacaatacgcagcagtaattggttgacaataccaatgaggggccaactgtgaaccgcaccccgattgttggactgaggaaattcagattcgatgatcggaggtgcggttctttcgtatgcgtgaggatcggaggaaacgttacgacgacgggttccggcacgaggcgctggggctcatcaaggccggcgcgggcaagcatttccttgcccgccggcttgcgatgcccgtgcagaccgcggaaaaatggatcatgaaatacaggtccaacggagaggacgcggtcatgggcgcgaagggcaaacgcagctacgactgggggacgaaggtcgcggccgcccgcgaccacgtcgacaacgacatgaccaagacggaggtcatggccaaatacgcaatcgcgagcgtcgcgcccctggagcgctggtgccgcgaataccgtaccggcgggcccgaggccctgcgcccgaggcccaagggcaggccgaggggcgcgagatccggtccgaagcccaagccgacgcgcgagcaggagctcgccgaggaggtcgcctacctcagggcgaaggtcgcgtacctggaaaaagtgcgcgccctgcgggcgtggaagtcgcgaggcgcgagcgaagcgccatcgtgcgatcgctcgcagggcggggacaccggctcgaccacttgctgagggccagcgggttggctcggtccacgtactaccgtcacctgtctcatccggagcatgtgacgcgagccgacctcgaaccgctgatcgcggcggtctggggcaggaccgccaacgggtgcgggcaccggcagatccacatgtgcctggtccacgagttcgggcggagggtgtcggccaagaccgtgctcagggtcatgcgccgcatggggctcaagtgccggatacgggcggcgaacccctggaggaagtacagctcgtacaggggcgaggacggcgaacgggtgccgaacctgctcaagcgcgacttccgggccgacaggccgttcgccaagctcggcaccgacgtcaccgagttcaaggtcgcaggcgccaaggcctatctcgcgccggtctatgacatggccagcaaggagatcatggcctgggacgtcagccggcatcccgacatggaacagcagaagcgtctgctcgccatgctcgcgcccaagctgcccgccggcgcaagccccgtattgcactcggacatgggatggcagtaccggcacccgtggtggcgcgaacggctcggggaactgggcatacgacagtcgatgagccgcaagggcaactgtctggacaacgccgccaccgaacaggtgttcggccatctcaaggacgagttctaccgcgaccgcgaattcgactcgtacgagcggttcaaggccgagctcgacgactacatcatccactggaacaccaaacgacgccagatacgactcggtggacgcaccccggaggaattccggagagcgtccaccgtggtctgagcctgtatcctaataaacagcgtccaacaatcggggcgcagttcactgttcagctgacccctcattttttgaattcagttcacgccttggacttggcggtttcgatccacttgttgaacagggcttcggccttgccggagtcaaccgtttcctcagcaagcttgtaagcctctgcaaagcgctcggccagcgtgccattgccgaccagattgccgtcggccacgatggcggaggcagcattgagcagtgcggtggtacgggacgggatgtccttgccggccaggaagttcttgaatgtgttggcgttgacgtccggcacgccgcccttgagctggtcgacggtgatcttagccaggcctagatccacggtcgggtcgaaatcggtttcggtgactttgccatcacgaatctcccagacggagaccggaccggtgggcgcaagctcgtccatgccctcgtgcgaggtgtaaaccagaccggactgcccacggctggcgtacacagcggccataatcgggctcaccttgcggttggcgcagccgatggccacgtgtgccgggttggccgggttggtcagcggtcccagaatgttgaagacgcatggaatgccgagcgcggcacgaatcgggcccacgaagcgcatggccgggtggaaggtgcgggcgaacgcgaaagtgatacccacttcgtcgccgacttcgccgacctcttccggcttcaggtccagcggcaggccgaggtcttcgagcacatcggcagcaccgcacttcgaggaggcggcacggttgccgtgcttgacaatctttacgccagctgcggcagcagccacagaacccatggtggacaggttcacggtggcgaagccgtcaccgccggtgcccacgatgtcagtggtctcaccggaaacgttcagcggcacggcgtgcgagaccatggccttggcggcaccacgcacctcgtcggaggtcagtcccagctgctgctgcatggcgagcgcggcgcccacggcggtcgggttcgcgttgccctgcatcaggtcgtccacaaaccactccgattcctcagcagtaaggtggtctcccccgaccagcttggtgagaatcgacttccatgtgatctcggccatgatgccctccttggcgttttgctacgccgtgttatgtatattcgccgctaattgtaatgacttcccatttcgcggccttgaatcttccatatagcaaaattggctcccctcttgaagagggaagccaatgcccagtattcagctagagatgtgtcacttctcgttctggccgtggcacatcttatacttgcggccggaaccgcacggacacggggcgttcttgccggtgccggggaaggtgcggccgtcggcccacggcgtcttgagctcgtcgctcttcggacgcttgttggccgggaccttgccttcggcatggctgatcggggcggggccagcgaccggtagggtggattcgccggactcggagacggcggcggattcggcgatggcctgcttggcgtcctcttcctcgacctcgccttcggcggcttcgacctcggactcgccgttctcgtcggggccggtagccacagtgacggagtcggcggtctcgtcggattcctcgacctcgtcaacggcatcctcggtggaagcgacctgcttgacgtcgatgtggaacagcaactggacggactcctccttgatggcctcgatcatggagttgtacatctggtagccttcgcgctggtattcgaccagcgggtcgcgctggcccatgccgcgcaggccgatgccgtccttgaggtagtccatctcgtagaggtgttcgcgccacttgcggtcgagcacggcgagcaccacgcggcgctcgaggtcgcgcaagccggtctcgccgatggtctcctccatttcgccgtactgctgcctggcgtcctcgacgatcaggtcgtgcacggcctcgacagccttcgcacccttgaggccgccgacgatcttcctggcctcgtcttcgtcgaccttggttgggatcacggtgttgagcgccttgaacaggccctcccaatcccagtccttcggtttctcggatcccttgttggcacccttgatgtaggactcgacggtgtcggaaatgaaacgcaggatgtccttgtggatgtcttcgcccttaagcacggcctgacgctcggagtagatgacggtgcgctgcttgttcatcacgtcgtcgtacttgagcacgttcttacggatctcgtagttgcgggattcgacggccttctgtgcggtgcgcacgcccttggtcacggacttggcctcgatcggctggccttcctccatgcccttggccatgacctgggccacgagctgggtgttgaacaggcgcatcagatcgtcttccagagacaggtagaagcgggactcgcccgggtcgccctgacggccggaacgaccgcgcagctggttgtcgattcggcgggattcgtggcgctcggtgccaagcacgtacaggccgccaagttccttgacttcctcgtgctcgtccttgacctgggccttgatctcgttcagggtgcccggccagcgcttctcgtactcctccggggtgtcttccggcgagtagccctcggacttgagcttggcgtcggcgaggaactcgacgttgccgccgagcatgatgtcggtaccacggccggccatgttggtggccacggtgacggcgcccttgcggcccgcgacggccacgacggcggcttccttctcgtgctgcttggcgttgagcacttggtgcggaatcttggccacgtccagcagggtggagaccacttcagagctttccacggaggcggtgccgagcagcaccggctggcccttggcgtgcctcttggccacgtccttgacgatggcggccagcttctccttcttggtgcggaagatgaggtcgtcctggtccttgcggatcatcggcttgttggtcttgatcggcagcacgcccagcttgtaggtgttcatgaactcggcggcctcggtctcggccgtaccggtcatgccggcaagcttgtcgtacatgcggaagtagttctgcagggtgatggtggcgaaggtctggttctcggccttgacctccacgccttccttggcctcgatggcctggtgcaggccctcgttgtagcggcggcccggcaggatacggccggtgtgctcgtcgacgatgagcacctcgccctgagtgacgacgtagtccttgtccttgaggaacagctccttggccttgatggcgttgttgaggtagccgatcagggcggtgttggccggctcgtacaggttgtcgatgccgaggaagtcctcgaccttggtgatgcccggatccaggataccgacgaccttcttcttctcgtcgacgtcgtagtcctcgtcgcgggtgagcttcaggacgagcttggcgaactgacggtaccagcgggtcacgtcgccttcggccggaccggagataatcaacggggtacgggcctcatcgatgaggatggagtcgacctcatcgacgatggcgtagtggtggccgcgctgcacgaggtcggccttctcccaagccatgttgtcgcgcaggtagtcgaagccgaactcgttgttggtgccgtaggtgatgtcggcgttgtactgcttgcggcgttccggcggcttctggtcggtgatgatgcagccgacgttcatgccgaggaagcggtagatacggcccatcagctcgctctggtagctggcgaggtagtcgttgacggtgaccacgtgcacgcctttgccctcgagggcgttcaggtaggtaggcagggtggcgaccagggtcttgccttcaccggtcttcatctcggcgatgttgccccagtgcagggcggcgccgcccatgagctgcacgtcgaagtgacgctggccgagggtgcgcttggagacctcgcgcacggtggcgaacgcctcgggcatgatgtcgtccaggctcttgccgttctcgatctgctgcttgaacttcggggtctgggccttcaaatcctcgtcggaaagggcggagatctcatcctccagcgcgttcacggccttggccacgttctccagcttcttgagctggtggccttcgcccattcgcagggctttgtcaacaatatcgaccacagggttctcccttgactgattgagtggtgatgtccgcgtaccagaatacagcccatcaccgtcagacatcgatatttttcgacctatttacaaaaaaatgggccgctccttgcgggagcgacccatttcatatcagctgtctacgtcagcgaactagcaattcagtccttcttgacgttttccggagtgtcgatctcgaacacgccatagctccagccgtgacggtggtagacgacggacggacgtccggtctccttgttcacgaacaggaagaaatcgtgtccgatcagttccatctcgtacagagcctcgtcgatgctcatgggctcggcgatgtgcagcttgcgacggatgacaatcggcgtatccccaacctggacttccacagactcgcccgggccaagatcggaagccactgcagcctgcggactgttgttcggctcctcctccagctcctctggctggctccggggcgataacgcccagatccaccggcaccgggttcgcgtagccgcgacggtgatccttacggcgatcacgggtgcggcgcagacgcagcgtcagcttatcaagcgccatgtccagtgcactgaactcgtcagtgctggaagcctcggcgcggaccacagtgcgtccggcgataacggtgatctccacgcgcttggcggtatcggcctgacgcgggttgccctcatgagtcaaaacaatctgcgcacgctgcgcatccggggcgatagcggtcacacgattcatcttggtctcgacgacatcacggaacctttgcttgatctgcgtgtgacgtccagtaacgacgatttccatgttgacctcctctagttcaagcggtttcccgctatgtgtgccgaacagcatcatcaccgtccgggtaagtttcattgtagacgaacaacaggtaaacagccggaaactcgcccatagaaatacgtttattttccgacttttatctgcaccccatcagtgcctatactgggtgtttgggccttgttcctcagcgccgtattttcggacggttcgccatttcgctatatttttcttttcgccagccggttctctatggcatatgtataattgcaagcttgagacctcttgatggccgcggccgtgatcttcattgggatcggctgaggaacttccgggctccatagagcacgatggcggataacgtccgcccagggtgacctgagagatagcgcagcagagaatagaccgcccgtcctcgacgggtaagggtgaaacggcggtgtaagagaccaccgggcctctggtaacagcaggccgcatggcaagcctcatcgggagcaaggccaagcagatggcggtaagggctgctcgcccatgtcatcgggtaggctgctagagcctgacggcaacgtcaggtcgagatggatggccatccgtgccgcgcgttcgcgtacggcatgacagaacccggggtataagaggtctcatttattcttttgcggctccgccgtgagtctatccctccggcgctacgcaccacctccctcgtcagagggaggttattacgacagtaattcggcggcgacgcggcgtagggtttcggggctgtgccctttgcgcccgcccgcggaccagaaccggcgctgacgcgcctgccgatcaagtccacgtgttttgcgggccactcgacgccccaattcccatgcggcatcttcgaatacgccttgttgttcggcctcaccgcacacctgctcggcgagccggcgatccacgcctttacgggcgagctccatcaccgcaccgcgcctgcccatcatgcggccggcacagtagcgcaccgccgattccgcataggcacgatcatcgatcagttgcacacggatgaggcgttcaatgacctcattaacgatttcttcgtcataccctttgccaagcagtcgttcacgcagcgcaccggacgagcgcggagccgcatccaagagacgcaacgccgcctcacggcaggcatctgcatcgttggaatcatcggcaaccgcgcccatacctcgccgagcaaatcgatgggacgactccgcatcgacgtttctttcgccctgttcggcacggcatcgttcctccaacgcaacgggattgcgctgaaggaacgcttctgcactaatcatgatcaggccttggcgcgagacgacttggcggcaggcgctgcagtggccttggtgtccttggcggcatcggccgcagcggcctcgctgactgcggcagctgcagcagcgtcttcgtcttcggcaaactgatcggcggaaccgatcaaaccaaattctgccttgaccttgttttcaatctcttcggtgatggccgggttgtccttgaggaactgacgaaccttctctcgaccctgaccaagctggtcgccctcataggtgaaccacgagccggacttcttgaccacgccgacctgttgggccatgtcgatgaccgaaccttcgcgggagataccttcgccgtaaagcatgtcgaattcggcggacttgaagggcggggccatcttgttcttgaccaccttgacgcgagtacggttgcccaccgcttcatcaccgttcttcaaggtctggatacggcgaatgtcaagacgcacagaggcatagaacttcagagccttgccaccggtagtggtttcgggattaccgaagaacacgccgatcttttcgcgtagctggttgatgaagatggcggtggtacctgcttgggccaaggcaccggtcatcttgcgcagagcctggctcatgagtcgggcctgcaaaccgacgtggctgtctcccatctcgccttcgatctcggcctttggcaccagagccgccaccgaatcgataacgatgacatcaagcgcaccggaacgaatcagcatgtctgcaatctcaagagcctgttcgccgttgtccggctgagaaacgataagcgaatcagtgtccacgccaagtttgcgagcataggccggatcgagcgcgtgctcggcgtcaatgtatgcggccacgccacccttcttctgggcattggccaccacatgcagggcaagcgtggttttaccggacgattcgggaccatagatttccacgatgcggcccttcggcaggccgccaatgcccaacgccatgtcgagcgcgagcgaaccggtagggattacttcgacattttgcacgggctgatcgccgaggcgcatggccgagcccttgccgaagcttttttcgacctgcgccaaagcagtgtccaacgccgccttgcgcttgggatcgagctcgtgcttggtctcggttgccggatcttgggccggcttggtctcaagtgccatgatcttctccttatcgaagtcgtatgcgggtgaacgccttccaccgtatgggaggccatctcccatgacaagccaaaacgaccattgtggttccagcttgcccgatcacgcaagacaagaaccgcttattcccgccgaaacgggcgattcgcatcttgacatatacggcgtgcctatccgtcactgtggataactatagccgcacaagcgaacatttgttcgaatttgcgcaacgacacgccggcgagtatcgttcctcgacccagccaatgaaatcgaccgcccagcgccacagcatagagcccactacgcagcgggcagcggcggcgcgttatggtcacggccccaacgcttggaatcaggaatctccatctgatcgcagagcacgttccaaatcacgcgaggctcctcccccgcgtccaaagcctcaagaacggtcatattcgccagctgcggcatacgctgatcccgggccagagaccggccatagctacgaccgaacacttcttcaagcagctcccaaaattcccgttcacgcatacccgacagtgtgccaccacccgccggacagaaaaacccgcaccgccaaacggcgatgcgggtcaacaactcaggaggacgttcccgcccctcatctcccacacgattaacgttcgacggactcgaggtaatcggccaccatacgcagcatctgtgcagttgacacgcccagcgcatcggaaatggagctcagcaattcggagctggcttccttctgaccacgctcgacctcggacagatagcccagcgagacgccggccttctcggacacctcgcgcagggtgcggcgatcacgtgtacgcaggtcacgcagcacatgtccgatagcaccacgcaaagaaacctcacgcggctcctcttcgaccaccgcggtctcggcaacggcattgggctggtaggaggcggattcctgctcctgccacatacggtcacgagccgcctgacgctcatccttggccttctttgcggcctgggccttgagcacctgctgctgcgcaaacatcactgcacggcgctgggccggggtcaattcacgcatacgggcgacaccctgctgtacagccatcggcttcttagcggacacttccatttgttcgttcactcgggtcatcgtttccatcgccatagccccttccaaggtcggttcagtgtttccacttagtacaacacgatgaccccgcggttttattccttaaaacttgctgtgaatagactcaagttttgcagaacgtggaatacggtttggcggcgaacctcctcgcgggtgccactcaaacgcaattcgacggccttgactatctcgatgccatcgtcagcaagagtcgcagggatacgtaaacccacatagaccagaccagcgggcttatcgccgtccgggccgggaccggctaccccggtggtggatagcccgataacgcaatcaccgtattccggctgcccatataaccgcgcagcgccagccgccatctgacgcgcaacttcgggatgcacggcaccctcgcgctccagcaacgatcggtcaacatgcagaatcgaggctttggccttgatgtcataggtgacggccgaccccagcagcacattggaagcgccgggaatacgcacaaaggcatcggagagcagacctccggtcagcgattcggtgcaagctatcttcgcgccgcaagtctcgcagacggcaagtatgcccgcagcaagctcgtcgcaggattgctgcagcttctcattagcgctatcagtcatatgcggccttccttttccaacctatgcaacgcctatacaacaatgggatgcggcggcaggccacatcccatcaatgccatacgttacacgaatgattccgtcactgcttcttggtgccgacgaacgtgttgtacaggtagatgacgcccgagtagaggcacagcaccagagccacatagataatggcataggtcagaaagtagtaggcggtcatccagaacggcgtgctctggccgctacccagagaccacatcggcaacaacagcatggcaagacccacacattcaaacacggtcttgagtttgccgggccatgcagcggcgataaccttgccgccggggcgttccatcacaaagaaacgcatcaccgtaatgccgatttcgcgaatcaggaacagaatggtgacccaccaggcgagctcaccaaacgcagagcatacgatcatcgcaccgcaggtaagcagcttatccgcaatcgggtccatcagcttgcccatttcggtgacctggttgtatttgcgggccatccaaccgtcaatcttatcggtggaggcggcgatgatgaacagcaccgcagccacccaacgcatggtgaggttattcgcgccccactcacctgccatgatgtcgagtaccaggaaaatcaccacgagcacaatgcgcgagtaggtgaccaggttcggcggcgcgttccatccgtcgaacaatgatgatttgggcgttgactgcttgtccattgtgttctcatccatagtgttcacgttacccccacacttctaccttaggtgggtattggctggagattgacggttattcttcggaaatcagactgtaacccagcgtctgtgcaattacgcttctctccctccgccccttcggggcacctccctcagcagagggaggccaaaagatgattcactcaccaagctcgggctgctgaggtgccgaggattccagcgagctggtctctcctcggataaaggcgagcacctgcggcaaatcctgcggttggacgagcaccgcacgagccttggatccctcggaggggccgaccacgccacgtgattccagcaaatccataaggcgtccggctttggcaaagcccactctgagcttgcgctgcaacatcgaggtggaaccgaactgggtggtgaccacaagctcggcagcctgcagcagcacgtccatatcatcgccgatctcctcgtcgggctccaggctgtccttcttctcagcctccttggccatctgttcgatgtcctcgcgatacttcggcttgcgctgcgtgcgcacgaattccacggctttgcgaatctcggattcggaaacccacgagccctgcacacgaatcggtttggcggaacccatcggcaggaacagggcgtcaccctgaccaatcagagtttcggcaccgaccgtgtcaaggatgactcgcgaatcggtggcggatgaggtggcgaacgccagtcgggaaggaatattggccttgatcagaccggtgaccacatccacggacggccgctgggtagcgagcaccagatgcacgccggcggctcgcgccagctgggtgatgcgctggatagagctttccacgtcgttcttggccaccatcatcagatcggccatctcgtcgaccaccacgagaatgtacggatatggggccaccttgcgctgggagcctgccggcgcatgtactttgccggcacgcacggcttcattgaagtccttgacatggcggaatccgaagtattccaaatcggagtaacgcgcatccatctccttgaccacccattcgagggcctgtgcggccttcttcggatcggtgatgataggagtgagcagatggggaatgcccgcataggcggaaagctccacacgcttgggatcgaccataatcaggcgcacctgttcgggcgtggcgcgcatgatcagcgaggtcagcatcgagttgatgaagctggacttaccggaaccggtggcacctgccaccaacagatgcggcatcttggtcagatcagcggttacgaaatgaccttcgacatccttgcctatgccggtaatcatcgggttcgggtcgttcacggccttatcggaacgcagcacgtcgcccagatgcacgatctcacgatcctcgttcgggatttcgatgccgatggcggatttgccgggaataggcgaaaggatgcgcacatcggaactggccaccgcataggcgatgttgcgttgcaggttggtgactttttccaccttgacgccggatccaagctcgacctcatactgggtgaccgaagggcctcgcaagaatccgacaaccttggcatccaccttgaattgctcaaaggtggaagtcagcgcccgaatcacgcggtcatttgccggcgtgcgcatcgcgtggggctgccccctggtcagcaagctcaggtcaggcagctggtatggcttattggcatcgtcctcagcatcgttcccattggcagcgtttggctggccatcggtattggggatgccttggcccacgccgctgccatccgcattggctcccgcataagcgccggtggcatcagccccagctaccgcaacggtggccatatcggtttgcgtggcgctgggtgcccatgggtcatttgtcgccggcccgctgggcataacgacagtatggtcggcagcaaccgcactcgtaggagcggcatcggcggcagccatgtctccgacggcatgcgaggcaccctcataggccgaggatgcgatggtccgacctcccgtgatttcgccggttgccgtatctaccactggagtttccgcagcggcgccatgctggctggccgcacggtcgaagggattgtcggcggcataccgatcaagggtctggtcgtcctccgtcttgggtttacgtccaaacagccgagcgaagagacccggtttggccgtaccggacttgttctctccatcagactcctcatcggtgccatcatgcgcgggcacgccttcggcaaaagcgagcgtggagtctccaacacgaacctcgttggggaactgattgccgtcatccggctcctggcccttgggcacatatggtttgcgctggatcttggcggatagcttacgaacgtcttccggtatatcggtcacatgggtgccggtaatcatcagcagggagaacagcccgacaactacgaacacgataatcgcgaatacattggatagaccccaagcaagcggcgagccaaggaaaaaacccagtagtccgcctgcagattgcagaaccgcgatattgaaggatgtatggctagacgcgatggccacatcaagaatcgaacagacggaccacatcagcagcacccaaccggtgaccacacgtggattgttggatcccttgcctgagttgcgcatcaaacgaatggccacagcggaaagcagcaccggcagcacaacactcatcagcccgagcacgccagacgctatggcatgcagcagctggccaaacactccgtcaacacgaaaccattcggaagcgcagaacagtacggcgagcacgagcaacaggaagcacaggccgtcacgacggtaggcgggatcgtactcaccgacgccggtaaccgcacgtacgccggcgcccaaggcacgcggaatcgcaagcaggaccttcttccatgtgggctcaacatcaaggtcgaactcaggttggaccttggtctcgccatcatgggtggagttcccgccgcctttggatttgcggccattattgctgttggaggatgctgttcgtgccatatcgtgactgattctactaggacgggggctcatggccggtgacgacaccgtgacaatgcaggataagcgaaatcaccggtcactgtttcagcgatttcatcgcggccattccccctatcaacgtcggatataccctatgatgggttgcatgacacccgcagagcgtgcgagcgcagtcgcatttgcactgaagaactgcgcactggaagctatgacgccgggcgaggcaacgatgcgagccgcggcctcctacgaacgcggtttggaagccgtgactcatctcattgatgtggccgatgagcaaaccgctatgcgtttgcgtgccgcagcgagttccgcgggcacggatcgtttggctgcaggcagtcttgatgatcacgccacggatcgtgccgatgccgtgttcgcccgtaccgtgttgctggcggaacgtcgctggaacccttcaggcgatttggatgagttgatcgccatacacaaggatctcttcgagggtgtgttcgaggatgccggcaagctgcgtacgtccaacaccacgcgtgaagtgaccaatgaccgtgagcgtgccgcgaatcctgaggcgttcttcccggctggtctgattgagaccggcgcgcataatatcgcgacggaattggctgacaaacgtaacctgcatgccatggatcgcgatgtgttcgtacatgcgtttgcgtcgctgtatgacgaattaggttatctgcatccgttccgaggcggcaatgccatggtgctgcgcatattcggttcgcgtctagctcatgacgccggctgggatcttgactggggcgaagtgacacgcgaggaatatcgtgccgccaaacacacggcctatcgcggtgacatctccgcattcgaggatatgttcgaccgtattctgcgtcccgccaatccaacgcgcgtattccttatagccggttggaaccaaggaccagcacactgatttcctgtacgtgtctcccctcgaagaggggagacacgtgatttatgctgcgatatctcccagatgatgttgggtatattcgtcggcacgggcgtcaatggggtcatagtcgccggcatcggcatgcgcgatgatggccatcgcattgtcgaccagcttcggattcagcgcctgcagccaatggatgcgagggtcgcggccgaaccaacccatctgcttgcgggccaaccgcttggttttctgcgcgatatcggcaaacgcctcgttcacgtcccagatgccgtccagtaggtcgatgacctgctgataaccgagcgcgcgcacggcggtggctcccaaatgagggcggatacgttcgacttccttgataaatccatcgtcatacatctgcttggtgcgcaggtcaatgcgatgatccaaattcggacgatccagatcaagaccgatttggacggagggaatcacataacggtagcgcggcaagcttgccgaatacggtttgccagtaagctcgatgacttcaagtgcgcgaatggtgcgtcgcgggttgcgtggatccatacgcgcggcggcttcggggtctttatcccgtaattcgtcgaacagcacgcccgccccctcggttttttcgcgttcctcgagccgtttgcgcacatcagaatcagtgccgggaaaagtaatgtcgtcaatggccgccctggcatacagccctgaaccgcccacgagaatcgggcggacatcgcgtgcctgcaaatcagcgatggtttgccgggcgagcttctggaaacgagcgacggtcatcgtgtcttccggttcgatgatgtcgatgaggtgatggggcactgccgcctgttcttcggcgctcgctttcgcggtgccgatatccataccgcggtacatctggtaggcgtccgcgttcacgatctcggcccgctcccccgcctcggccaaccgcttggcaatggcgatgccaagcccggtcttgcctgaggcagtaggccctacgatactgacgactcgcttcatattgttttcccctcgtacacttttgctcgtaccgtaactcccctcagtccgcttcgcggccagctcccctcagagaggggagccgagaacttgcagttcctctctctgagtggagaaccttctcagtgtcgcaccgagtaggtctgcccttgagcaaggtcagggtcggcgatgagattgtggcgaccggcatgggtgacggtggccgtcacgaagtcgccaatctgcggcatgggctggccctcgggcacgccgatatgcaccagcacgccggtcttctcgcggccggtgactcgatgggtgtcggcatccttcttgccctgagtaccggtgatcatcacttcaacgtcacggccttcgaaggactgcagattctccgcggtgatctgttcctgcaacgccaccagtcggtcgaaacgatcctggaccacatcgtgcggtacctgttccatttcggcggccggcgtgccggggcgcggcgagtagatgaaagtgaatgcggaagagaaccgcgcttgacgcacgacatccaaggtctgctggaaatcctcttcggtctctccggggaagccgacgatgatgtcagtggaaatctgcgcatccggcatggcctgacgcaccttctccagaatcgtcatgaacttggatgcgcggtaggaacggcgcatggcccgcagaatcttgtcggagcctgactgcagcggcatatgcagctgatgcatcacgttcggggtctcagccatggcttcaataacgtcatcggtgaaagcggccggatgcggcgaggtgaagcgtacacgctcgagcccatcaatcgtgccgcaagcacgcaacagtttgctgaaggcgtagcggtcaccgatgccatatccgaaggaattcacgttctgcccgagcagggtgacttccttggcgccgttggccacgcactggcgcacttcgtcaagaatgtctcccggacggcgatccttttccttgcctcgcgtggtcggaacgatgcagaacgtgcaggtgttgttgcagcccacggaaatcgccacccacgaactcacgcgggaagccctggccgcaggcagttggcttgggaactgctgaagctggtcatcgaccttgacctgcggagtatcggtggcacggttctggttgagcagttgcggcaggtcgccgatgttcttggtgccgaataccgcagcgacccatggcgccttattggcgattttctggcggtcaagctgagccatgcacccgccaacggcaatctgcaggttcgggcgctgacgcttcatctccgcccacaggcccaccgtgccatacatgcgttcggcagcgttctcacgcaccgcacaggtgttgagcacaatgagatcgaggtcatggtcattgacctgttcctcggtggccggcacataaccatctgtctcgagcacgccggcaatgcgctcggaatcatgcacattcatctgacaaccgagggtatggatgtggaacacgcccttgccgcgttcctgtgttgtaaggtgctcatcggattcaatcgaggcgcgctccgcctcggtcatcatgtcttcgttcataatgatcgattctatcggccgggttcgtcatgatgcgcggcagcggtccgcaccaactggagaaaccggtacatggagtatcttgggagattccccggcaactcccatatcgggcagcttgagccgagtatattgattgacgtgatacttgaccgacatagccgactgaacacttccgacctgcaagcccgactgaagacgctggacttgcccggcggcaccttcaataccgagcaaatcaccgaattcgtggatcagatgcaggtatatgaaggcgcaatgtacgaaatcagcaccaagctggaaatcctcgatgccgagttccaggtgcgattcagtcatgatccgatacatcatatggaacggcgtctgaaatccgtgaactcgattatcggcaagctggaacgcaagggactgccgctcagcgtcaattccatcaaagacaacctgtttgatgtggccggcatccgcgtgatctgcaattatcgcgatgacgtgtattccgtgtcgaactacctgtcgtcgcagtccgacattcaggtgctgcgagtcaaggattacatcaagaatccgaagcagaacggataccgttcactgcacgtcatctatgcggtgccggtgttcctgtcttcaggcgcgcattacacgccggtcgaagtacagttccgcaccatcgccatggattactgggcatcgctggaacatgcgctgcgatacaaaaccgacctgccggacgccaaactgaatgagcattcgcagacgctgctcgactgcgcgcgctccttgcagaacatcgaagtgcagatgcagaacattcaccgcgatattaacggcgcaccgcaggtgggcgaagcgcccaagaccacggactagccttttctcagaatttttggcagtttagcaggggcctgcgccagcagagtgccaatgaagatcagcgcacagccaagatatccacgaggagtcatcacctcgccaagcagcagcgcgccgccgaccgcggagaaaaacgattccaggctcatcaacaggctcgcgcgagtcggcggcacccactgctgaccaaccacctgcaacgtgtaggcgatgcccaccgaaccgaagccagcatacagaatcggaatccaggaatgcgcggcaccggcccaatcgaccgagccctcaatcaaggaaccagtccaactcaacacggcggtagtacagaactgcccgaatgaaagtttgatggcatccactttggcacccagcgtgtcgatgaccaagatatgcacggcaaacaacacggcagtaaagaccagcagaatatccgccaacccgattgaaccgaatccgtcagtgatgcacaggaagtaaaagcccgcgatagacaatgccacggccgcaaacaccagcatgccgatgcgccgacgcaggaacacaaatgccagtaacggcaccatcacgatatacatggcggtaaggaatccagcgcgcccggctgatttaccgtacaggatgccatattgctgtaaagtgctggcggtgaaaagcacaatgccgcaaatcacggcaatgataatcgggttggcgagcagacgaatcgcaggcgatgaggtctgaaccaactgatctcccgcaccgactgccgcggtgtcggcagcttcactggtactgctgctcccccgaccacgctgccacagcagaatcggcaccaatgacaatgcacctagcgtgaagcgggtggcattgaagaacatgggggacatcgaatccatgccctgcacctgcgccacaaacgcaaagccccagatcagcgcggtcagcaacaggcacaacatacccacaagttcttgtcttttcacggggagtcagcctaccgcccagatgtgtcgggcatgaaaaagcccggccacattgtggtcgggcttgatgcggtcgtatgccgcgaatcagttcatgactaatccctgttgcccagcaactggaggatgtagaggaacatgttgatgaagtcgaggtagaggttcagcgcgcacaggatggaaaccctcttgaccatctccgggccctgcgcctcatactggctcagcaaagcgcgcgtggactgcgcatcgtagatggtcatgccggcgaacaggatcagaccaagcgcgcacacaatctgagtcatgccgtcaacgtgcaggaacatgagcaccagctgcgagatgataagcacgatcagaccaatcataagaatcggaccggccttgagcatgttgatcttggtggtcatgccgaacatggtcaaagcgaagaagaacgccgcagtgatacccagtgcggtgacgatcgaaccaaggctgtacaccatgaagatggagctcagcgtaaagcccataagcgccgcgtacacatagaacatgacacgggcggtgccggacttcattttggtgacacgagcgccgagcaccacggcaagacccacctgaaccacacaaagcgcgatgaggccgatggcaccggtggatgcgaggaacgcgtaataggctcccgtcatctgcccgataaacgccactatcgcggtgacgatgacgccaatggtcatttcgccgtagaccttggttacggaagcgcggcgagcctcctcatagttgtaagtcatcgtcgtgttgatggccgctgcgcctgcacccgtgtcttgcgcggcatactggtagttctgctgcgcggtgttgtaatcggaagtattgtattgcgggttgtactgcccgttgttctggggctgctgaccgaatgtcataatcgctcctttagcgttgtttcacgttccatactagtagagcaatgctgaacattccatgaatgagaacggcttttcgtgcatctcagctcgcggcgtaacgaataccgagttgtttatgattggcatgaagctcagtaccaatcccaaagcgccaaacaccacggcaacaacaccacagatcgtaaggggctgacgaggctgatgccgagcggtctcagcaggagcaatcggaccgagctgcgtaacgggttgctgatcggatcaagagggactgacgaacgtacggcgtcatgcgcccgaaacaccggtatcgttggaggtttcggctttcccatcggcgaacagccggatgtggtgttgatggatatcgccatgcctgatgtggacggcattgaagcaactcgcagactgcaatcgctgccccatgccccgcatgtattgattctgacttcgctcagcccttccagcaccgtggagcgtgcggtggaggccggcgctgaaggctttgtatcgaaaaccgatgctcctgatgacattattcgccgcgttctgggagtatgcgccggggcaccacagttcaacacagccagtcagaaacagctgattgacgatttaagcgagtctcaaccgcgctcgcgcagagatgaggcgcgcgaattgcttggtgcgttgcccgatcgtgagcgtgaagccgtgatgttggctgcggaaggctataccaacgccgagatcgcctcccgtatgttcatctcggaacgcacggcaaaagcgcatctttcctcggctgcggacaaactgaacatgggtcgggtacagatggctcgacttgtggagagggccgatctgcccgcacgattgtaagatgcccttccgttacgctcgcggcttcatcattgttagggcgtaacaggcataatgggcatatgagtgaaccgattatccgcactttgcgcaagagcgactacccggcattaatcgacgtggtgcgccgcatgtggtaccccgagtacgacgagaaaaccggcctgctggcggccgagaccgactgggagaactgtctggcacgcgcgacctgcgcgtttaccgcggaactcgacggggaaccagtcgcgttgattctggggcgagtcgacgcgttggaccatcgcaggccgttgaacactcatcgcatcaattccttgcgaggtctgctgcgattggtgtgcgctaaggacggacttaaggccgccggcgatattctggggattctcaatatcgatgaacatctgcgtaaacaggctacgcagactggtcacgactactcggcggaagtggtgttgttcgtgctggatccggcggctcgtggacatggactaggccgccgcatgttcgataccttgatgaccgcattccgcgaagccggagtgagcaagtatttcctgtttaccgacaccacctgcgatgtcggattctatgtgcatctcggcctggcccaggtaagcgagcatacgctgcccacgaatggcgacggcgaacaggccacgtctttctacctctatgaggggctggttcccgagaattaaattaccctgctcggcatagacgacaaaccattacaaacgataaaggccggtatcttagaagataccggcctttgctcccctcagtcagcttcgcgctcagagaggggagccaagaaagttacttcatgaggttacgcagcacgtactggaggatgccgccgttgcggtagtagtcggcctcaccgggggtgtcgatacgaaccactgcatcgaactcggtcttggagccgtcctcgtgagtggcagtgacatgaaccgtcttgggtgttacgccctcattgagcttctcgacgccggcgacgtcataggtctcggtgccgttaaggcccaaggactcataggattcgtctgccgggaactgcaacggaagcacgcccatgccgatgaggttggaacggtggatgcgctcgaagctctcggtgatcacggccttgacgccgagcatcaccgtgcccttggcagcccagtcacgcgaggatccggtgccgtattccttgccggccagcaccacgagcggcaccttgttgtcgatgtagtcgcgggaggcttcgaaaatcgtggtcggcttcttggcgaggaagtcgtaggtgaagccgccggacgtcacctcctcgcccacggaggcgagcagctggttgcgcaggcggatgttgccgaacgtaccgcgcaccatgatctcgtggttgcctcgacgggaaccgtaggagttgaagttcttcggctccacgccgcgctcggtcaggtacttgccggcaggactggaggccttgaacgcgcctgccggggagatgtggtcggtggtgaccgagtcgcccaacagggccagcacgcgggcgccgtggatgtcggcgaccgggtccggcgtggccttcatgccgtcgaagaaggtctgcttgcgcacgtaggtggacttgtcgttccatgcgaacagttcgccttccggcacgtcgaggcccttccagcgatggtcgccgtcgaatacggaagcgtagtccttaaggaacatctcgcgactcacggtgccgtccaccacggcggccacctcggagttggtgggccagatgtccttcaggtacacgtcgttgccatccgcatcggtgccgagcggctgggtttcgaagtcgaagtccatagtaccggcgagcgcataggcgataaccaacggcggggaggccaggtagttcatcttgacgtccgggctgatgcggccttcgaagttgcggttgccggagagcacggcggtgacagtcaggtcgttggtgttgatcgcctcggaaatctcgggcagcagcgggccggagttgccgatgcaggtggcgcaaccaaagccgaccagctggtagccgagtgcatcgaggtcgtcctggaggcctgcggccttcaggtagtcggccacgacctgggagccgggagccagcgaggtcttgacccacggcttcggcttcaagcccttggcgtgcgcgttgcgggcgatcaggccggcggcgatcatcacggatgggttggacgtgttggtgcaggaggtgatcgaagcgatagccacgtcaccgttctcgatgttgaaatcgccacggaagtcggtggatacagccaccggatccttgacggtcttctcggtctcgtaggcgggagcggtcttctcgaacatctccttggcttcggacagcagaatgcgatcctgcgggcgcttcggaccggcgatggacggcaccacagtgccgaggtcaagctcctcgtattcggagtactgcggttccacgtaatccgggtcggaggcgtcgccccacagcttgttggccttggcataagcctcaaccagcacgacctgctcttcggagcggccggtcagacgcaggtagtcgagcgtgacgttgtcgatcgggaagatgccgcaggtggaaccgaactcggggcccatgttgccgatggtggcgcggttggccagcggcacggaggcgatgccctcgccgtagaattccacgaacttgccgaccacgccgtgcttgcggagcatgtcggtgatggtcaagaccacgtcggtggcggtgacgccctccgggatggagccggtgagcttgaagccgaccacgcgcggtacgagcatggagatcggctggccaagcatggcggcctcggcctcgatgccgccgacaccccagccgagcacacccagaccgttctcggtggtggtgtgcgagtcggtgcccacgcaggagtcaaggtaggcaagcgtgttgccgttggcctcggtcttgctcatgaccaccttggccaggtattcgatgttgacctggtggatgatgccggttcccggcggcaccacgcggaagttcttgaatgcctgctggccccaacgcaggaactggtagcgttcgccgttgcgctggtattcgatgtccatgttttcctggaccgcgttggcgatgccgtacttatcgatctgcacggagtgatcgatgaccatgtcggactgaacctgcgggttgatgacctccgggtcgccgccaagctccttgaccgcgtcacgcatggtggcgagatccacgatgcagggcacaccggtgaagtcctgcataatcacgcgggacggcgtgaactggatttcatggctgggctcggcgttcggatcccagtcaagcagggtcttgacatgttcgtcggtgatattggcgccatcaatattgcgtaccagattctcgaccagtaccttcagcgagtacggcagatgatcgatgccgtcgagattggcgatgttgtagtaatcgaagtccttgccggcggccttcaaggtcgccagctggtcgtcgcgtaaggacatgcttcctccgaaatcatgtatcggcttgtctatgccgctgattatccgcttcaaatggtacgggtacgttactttgcctctggcgtgtcggcttgaagtgtgagacaattcgccgctattagatgttgaatccgtgttggcgcagcagcttgccggatactttgccaacaagcggcgccagccataggcagatcacgaaaatcagggccgaaccacccaaggcgatcagcgtggccaccaacgtagtgccggtcggcagaatcaacgcgaagaagttcgcgacaaacgggatgaacgcaccaatcattccggctgcggcaaacgccgcgaccagtatgcctcgccaactgttgaggggctgagccacgcgggcgagcacgaatacgcccatcaggaacaggatgatcgcgctggtggcacgcagcgcggatagatcgacgtttttagtcacgtcccagcccatgatgccgggcaggaaccatgccgtcagcagcacggacagcgcggtggcgatgccgcccggcaacgcgaaggtgaccacacgcttcaagaatcccggaatatagcggcgggtattgggcgcgagcgccagaataaacgcgggcataccaatggtaagggcgccaatgtacgtgatgtggcgcggcaagtatgggtacggaatctgggtcagcaccacaccgagcgaaatcagcgcggagtacacggttttgacgaggaacaggctggccacgcgttccatgttggccatgacctggcggcctcgcgccaccacatccggcagatgagagaactttgaatcgacgagtaccacttgggccacggctttggtggccggcgcggcattgcccatagcgatgccgagatccgcttccttgatggcgagcgcgtcgttgacgccgtcgccggtcatggccaccacgtggttctgcgtgtgcagcgcctggacgatggccttcttctggttgggtagcacacggccaagcacatcgacgttttccagcacgcgagcgagttcgttcacgtcttccggcagttctcgcgcgtccatgaatcgcggctcatgttcgccggtcagcctcactttgcgggcgatggcaccaaccgtgaccggattatcgccggaaatcacgcgacagcgcacaccctgctcacggaaccaagcgagcgtctgctcggcatcctcacggatcttctcggaacacagcaccagcgccaccggtttggcctgcgggtcaatctgtggattgtccgtatcagcgagcgatgccgtggaacgcgcaaccagcagcacacgattgccgtcattggcgtagtcattgacttgttgcagcacatccgaataatcaccgccgagcgcggaaatgatgacttctggcgcacccatgtaccaggtttcacccccgctggcgggggctgtcatcgcaagatgactgggggtgatttcagtacggccaccctccgactcgctgcgcgagtcacctcccgccggcgggaggataggcttcaccaccgcactccatttgcgggccgaagagaacggaacgcgggattcgacttggcccggttcgtagccttgggcctttagaccggcgagcacggcctgtccggtgccgttgggctgttcctcgttgcagcagtcgtagagggcctgcgtggccgcctgttcagtcaatgtctcaaaagaaccaccctcagttggctgcgccggcagctcccgccagcgggagccaagcatgatgagctggttgaaggcgatgccgccatcggtgatcgtgccggtcttatcaaggttgagcgcatccacgcgggcgagcgtctccacggattcaagttcctgcaccagcgtgttgtggcgagcaagccgcatggcggccaccgcgaagttcagcgaggtcagcagcacgaggccctcaggaatcatgcccaccacgccggcgaccgcggaaactacagcctgcctccattcgccggtggagagcgccgcatcccatccgccgaccgtgtgaatctgcgagagaatcagcagaatgcacaacggcaccacgaggaaggtcatgaacttcagaatcgtgttgatgcccttgttcaggtcggacacggtcttcttatagaccttggcctgagcggtgagcgtggcggcatatgagtggctgcccacggcgttgaccttgaccaacgccatgccggaaaccgcagtggctccggaatagacttgctcccccactttgtggcgcacggtacgcgattcgccggtgagcatggattcgtcaagttccaagccccatgtctggatgatctgaccgtcggcaggcacctgttcgccggaacgaatccacagcagatcgccgagcacgatttcgttgtgcggcacttcgatgtccttgccgtcgcggcgcaccaaaaaatcggaggctaccaggatggagagcttgtccagcgtgcgcttggccttgagctcagtgaaaatgccgatacccgtgttgatgatgatgacgaagccgaacaccgcatcccgccacgagccggtgaccagcaccatgaccatggccacgaagatgatgccattgaacaacgtgaatacgttggctcgtacgatgtccttaaccgaacgcgaggtggaggttttcaccgcattcgattggccgctttcaatacgctgcgacacttccttgacggtaagaccggtttcactgatctcaggcatttccacagctgctgttgcactcatatcttccagcctaccgtgccggattccataattcgctacgattcaaggatgatttgatttagattcactctgtggcaacggcgatggtacggtcgtggggttcgtcgcgtgtgatggtgatgactgcatcggcaatggagacagacttggcgctagcagcatcatctgtgttaagaatggcagcgtatagcagttcgtcttcgggcgcatgcttgggattgagcagggcgacgggaatgccggcttcgcgcacattggtcagcgcctggttccaactgtctcgattcgcgtcggtgacatcgatgccgctgatgattacgattttgactgcgcggtccacgaaatcggtgataccttgctgcgcggtggccgcgatcttgtcagcagtttcagaatcgcccgacgtgtccagcgaggcgtaatacacgttgagagtgtcatcggccagcgcatcgatggccttcttgtccgccgcggtatcggtcgatccgacgaaaccgacggtgatatccgttttgtgcgtcgaatcatgggccaccgatggcatgctgtcttgcgtatcgccgacggcgcgaccggtcggcgtgcaagcgaccaatgacaatacgaccgccccacaggccaacaacctcagaattcgacgcatcatagacccacccgtcaacggctgaaaacggccactgtctcgacgtggtgggtcatcggatagatgtcgaaggcacggatgtccttgagctcgtatccctctccaatcagggtggcggtatcgcgagcaaggctggtggggtcgcaggcaatgtagaccacgctggaggcaccggccgccgcaatctggcggcagaccttggcacgggcgccggcgcgaggcgggtcaagcaccacgatatccggcttggccaagtgcgcgggcacatgttccaacgttctggagacatctccggcacgggcatccacgtcgttcagattcatggcacgcaggttgcgctgggcattcttcacggccacgcgcgcgccttccacgctaagcatgcgggtgcgttcaccggtcatggtggccagtggcagggtgaacagaccggagcccgagtacaagtcccagatcacaggtgccacagcaccctgcaactgctggttgacctgattgatcacatgcgtgccgagtgcaatcggtgcctgacgatgcacctgccagaaaccgttggcatcaacccgataatcgaaggtcttgccgttgatggtcacctgttcagtgagcagctgggagccattacgcagctcgccatcgataagcacggcatagtcatctgcagcaatatcagcgtcgccacgcggctcaggtacggacagacggatctgggagccgggctcaaagccgccctcccacacatgctcgcgctcggccacgtccagcaatgcgcgggtagcgagaggcatggtgtcgatggccacgcgagtatgcgtaccgcgccggcgcatggacggcttgccgttctcgtcggcaatcatttcgatgcgggtgcgccagtgaagaccgtcaagctcctcatcaccgggcatgcgatcgattggcacggccacatcgatatgaccgagccggctcatctgctcggaaacggtgagggctttccacttgagctggccgggcagtgagacgtgcacgagatccgcgccgccgactcccccgcccatcgccagcgggccggcaagagaccaagccggatcgacacggtcctcggatgcttcgagcacttcgataacttcaccggtccagaaccgatcatcgcgatcatgaggttcgtcaagttcaatgcgtaccagttcgccgggcaaggcaaagcggacgaacaccacgcggccatcgatatgggccacgcagcggccctgatcggcgtatcgctcgatgcggacttcagcttgcatcgctgtcctttccggttttgcccgccacgggttcgctgacggcctcagccgcagatcccgattcggattgcgtaacgttctgagtagccacggctttatgacggtgcattggcgtggcgatgatgaggtagctcacccaaatcgccagcgcccagaacgggatgcccataagcagacgggccacgccaagcgcggccacatgattggtcagatacagcggcacctgcactgccaatcgcagcaggaacagaccgacccatagaccggtgatgatcatgtaggcacgtttcaatgccttatcactcatccagtcgttgaaccacgccttgaaatgctcggtaggcaggctacggatgaattcgatgaccagtccgaggccgggtacccgtgcaatcaatgagacggcaagcaatgcggcatagccggcattggtaatgaatccgaagatgtagtagttacgggcctcatgggtctgccatgcccaaatcaggcagatgccgaccgccaccaggccggaaaccgcgcccatcaccgattggcgttgaatcaggcgcgcgataacctgcagcaccgccaaaatagccgaaacggcgatggtgaggttcagattgctcgtgaccacgaacagcacgacgaataccacgccgggcagcatggattcgataacgccacgcgggccaccgatggcgtcgatgacggagaaatcctcgccttcattgccggcgtcggctagagcggacaggccggtgcgtttgttgtctgccaagtctcttcctataaatcagcgaacttcggagaacatcgggccgcgagacagcgtggtcttcacttcggtctgctggtcctggctcagcggacccttcggcttgttgtccggaatgtccttgaagtgttccttgccattctcctcgccggcttcggcggcggccttgcgctcggcaggtgccacgggcgggtgcatcggaatcagatcgcgcggagccagcggctcttcgccgcgctcaaccacgatgtccgcaaagaatttgttcagtgcctcggtctccgggctgtccggatcggtggcagcgacaccggagaagatgccacgcagcatccaacgcggaccgtccacgccgacgattcgggtgtttacggtcttgccgcccttgacgttgaccggcagcttcagctcggtgccaaacacgccttcgacctcggatgcagccttgttggcctcaatcagatcagcgcgcacatcatcccagagccctagggtcttgggagctgcgaatgcttcgatttccaagctggacttgccataggtgatggtggaaccaagcacctgctgggtggcgcggttggccttgatgcgcagttcgatgttctgcatgaacggcagatagtaggcacccagatccagatagtcatcgtagtcgggcacttcttcgtcgttcacatcccacggaccgcgttcctcgccacggcccacgtactcgctggaaggttccgccaatacggtttcagcgctttccgcctttgctgtggcgtttgcggcctcggcagccaccttgtcctcgtcgacaggctctacggccggctcggtttccttcttgtccttcttcttgccgaatccgaacagtcccatgattcctcgtttcgtataacggttgcaaccttgctaacactagcactcaggcttagagaaagctgagcatcgcggccgccggtgtccggttcgattcgtagggaggccacaatagtatggccgcatgaccatcaccattaccacgtctaacgtcaacggcattcgtgcggccaagcgcaagggcatcgaggattgggccggcaagcatgcaccggatgtctggtgcatgcaggaggttcgcgcacctcaggacgatgtcgattctattttcgatgaatttggtttcgaatatgccactgccggcaaaatcgacgcgccggccgacctccataccatgaacgaggtctgccgggtgaaaggccgcgcgggagtcgggctgctcactgacttggaagtgcttgacaagcgatatggtctgccaggtctgagcgaggatgtggattcggggcgttggatcgaaaccgatgtcaaaacgcctgagggctatacgatcaccgtggcatccgtgtacatacatgccggcaacaccgatgatccgaccaaaatggaacagaagtatcgttttctggacactatgctggcccgcatgggcgcgcttcgtgatgaagccgcacatggcggcaagcaggctgtattatgcggcgatttcaacatcgcacacacgccgctcgatatcaagaacgccaaggccaatgagaagcacgccggattcctgcccgaagaacgtgcctacgtggacaaatggctggacgaatacgagttcgtggatgtgatgcgttcgttggccggtgatattcagggaccgtacacatggtggagccaacgagggcgcgccttcgacaacaatgtcggctggagaatcgactaccagttcgccacgcccgagctggcggagaccgcacgcggattcgtcatcgacaaggctcccacgtatgacaaacgctggtccgatcacgccccactcacgatcacatacgaggtatgacgtattctgtgggacaacatccgaaaatcgacgattttcgcgggtcgtcccacgccccgcatcatgagtaattatcgactacgccaagaatggcgtaattccgggcttcgtgagaaatctactgtgggacaacactcatgtctatcgattgatgttgatgttgtcccacaaattgtgggacaacatcggaaaaacaccgatttttgcctttcgtcccacgcgaaccatcatgcaaaccgacacatatgaatattggggtctttccacggatgaaaagaccccaatactatgcgctcaaacgcagattatcagtccagaccgagctggagcttgccgccggggatggcgtcgagcaggtctcgggtgtactgcttctgcgggtggtcgaagacctcatcggtggtggcgtgctccacgagcttgccatgctgcatcaccacgacctcatcggcgatctggcgaaccacggctagatcgtgggtgatgaacagatagctcaggcccttttcggcctgcaggtcgttgagcagacgcagcacctgatcctgcaccagcacgtccaaggcggagacggcctcatcgcacacgatgacgtccggatccagagccatggctcgtgcgatggcgatgcgctgacgctggccgccggagagctcgttcgggtaacgacccatcacggaagccggcatctcgaccatgtccagcagttccttgacacggttggcacgcgacttcttatcgccaatcttgtggatgcgcagcggctcctcaatggaacggaagatggagtacatcgggtcgagcgaaccgtacgggttctggaacaccggctgcacatggcggcggaaaccgagcagatccttggccttgaacgtggaggtgtcgcgaccttcatagaacactttgccggaagtgggcttcagcaggtgaagcaccatgttcgccacggtggacttgccggaaccggattcgcccacgatggccagggtggtgccacgcttgacggagaaggacacgtcgtcgacggccttgaacatctccttcttgcggggcagcttgaattccttggtcaggtggtcgacggtgatgatgtgctcgcttttctcaagcgtgctttcgccggcgatgtggtggccaagcagggcgtccgcgttctcaccgcgctccttggcggagatgatgcgctgggaggccagcgacggggcggcagccacgagtcgcttggtgtacgggtgctgcgggtgctgcagcacctcgagggacggaccggattcgacgacctgacccttgtacatcacgacaatgcgctgggcacgctcagcggcaaggcccagatcgtgggtgatgaacagcacggcggtgcccagtgagtcggtgagcatgtgcaggtggtcgaggatgcgcttctgcacggtcacgtccagagcggaggtcggctcgtcggcaatcagcaggtcagggcggcaggccagaccgatggcgatgagcgcacgctggcgcataccaccggagaactcgtgcgggaactgacgggcacgggtggcggcgtcgggcagaccggcctcggacagcagacccgcgatacggtcatccattgtggagccgatgacgtacttcttggcgaggtaccaggcctgatcgtcggccacgccggccttgatgaggtcgtcggccacgcgccaacgggtttcggagcccggaacccattcgttggtgaagcgggcgacggccttgtcgaaggcctcgccggacacgccggcttcggtcagggccttcttggcctcggtcatgagctcgggcagttccttggcgccgaggaaggtctcgtcgtcgttgcccttgacttcgacctcgtcaccggccagagccttagcgagggcggagcgcttctcatggtccacgtccatgttgttggccttcagcgcttccttgacctgggtgccgatacgccacaccgggttgaggttgctcatcgggtcctgaggcacgaggcccatcttggtaccgcgcagcttgtcgaactcgctctgcttggcgccggcgatttcctcgccgtcaagcttgatggagccgttgaccacgtgaccggtgccgggcagcaggcccagcacagccatggcggaggtggatttgccggagccggattcgcccacgatggccacccactggccggggtagacggtgaagttggcgtcgcgcaccgcatgcaccggcttgccggtgtcggtggtgaagtcgatggccaggttccggacttccagcagcgggccatgctctttctgcatggccagcatcgtggcgttggtattgtcagtcattgtctttctccactccccttgctcaggccgttcggctcttcgggtcgagggcgtccttgacggcgtcgcccatcatgatgaacgcaagcacggtgatggccagtgcggcggacgggtagaacagcaccatcggatcggtctgcaggttggtctgcgcgctggagatgtcgccgccccagctcaccgtggtggtcggcaggccgacgccgaggaagctcagcgtcgcttccgccacgatgtaggaggccagcgaggtggtggcgatgacgatgatcggggccagggagttcggcaggatatggcggaacaggtttctggcaggcgtggagccgagggccgtggaggcggtgttgaattcgaggttcttcgattccagcacggcgctgcgggcgatgcggcatacgccgacccagccgaagagcgtaagcaccagcacgatcttccatatggacttggaggtcttgaacatctggagcaccacgatggcgccgagcagcatgggcagcgcgaagaagatgtcgttgatgcggctcagcaccgcgtcgacccagccgccgaagaagccggcgacggcgccgatcagggtgccgacgatcacgactagtagcgtggagagcacgccgacagacagtgaggtacgggtgccgtagaccacgcgggtgtacacgtcgcagccctgcaggtcgtagccgaaggggtgtccggcggaggcggggctcaaggagttgcccagatcgcaggcgttcggatcctgcttggtgaacagaccgggggcgatggccaccacgatgatgaacaggatcagcaagccggagatgatgaacagcgggttgcggcgcagggttcgccaggcgtcggcccacatgctggtggccggtgcggattcatcgacggaatcgacgtcctgcagcggggtctcctcgaggggggctacataacggtcctgaccgggcagggtttccatgaagtattcggttcccggctcgccggtctggttgagctcgttttcagtggtttcgtttgccatgtgactcacttctccctatcacgcgtagcggatacgcggatcgagggccgcgtacagcatgtcgacaacgaggttgcacactacgaaaatcagcatgagcaacgtgacgatggacaccaccaggtttgcctcgcccttcagaatggactggtaggtgaggaagccgatgccgtggatgttgaagatctgctcggtgatcatggcaccacccatcaggccgccgatgtcctggcccaggtaagtgacgactggaatcagggagttgcgcagcacgtggcgcagcatgacctgaccgttcgacatgcccttggcgcgcgcggtgcgcacgtaatcctcggcgatgttggaggagatttcggagcgggtcagtcggatgatgtaggccatcgacgccgatccgagcaccatggccggcatgagcaggtcgaggaagccggggtcggcgcctgccgtcaccggcaatatcgcccactgaataccaaagacatattgcatgacaaagccggtgacgaaggtcggcacggaaataagcagcagggagacgatcaggatgacggtgtcgtaccacttgccctttttgaggcccgagatgatgccgaagaccacgccgaagatcgcctcgaacacgaacgccatcaggccgagccggatggtgaccgggaaggcgcgggcgatttcgtcgagaacaggctgcccggcgaaggtatcgccgaagttcagggtcagtgcattcttcaggtagataaagtactgaacgatgaacggctggtcgagatggtattctgcgcggatctgggctgcgacggcctcattgacaggcttgtctccgaacatggccttgacggggtcgcccggcagggcgaatacaagggcatataccagaagagtcgtaccgagaaccacggggatcatctgcagaatgcgtcgcagaagatacttacccatacggttgctccttatttcctagaccggccagaaagggtataacaagaccccttccggtcgataaatactccgacagtttaccgcatgcccggactgtgatatgtaaatttgcgttaacgcaaggtttgagattgggcaatactggtggatatgtccatggttgcggtcggatagtggatactttaacttggttcccgctgtcgggagctggctcgcgaagcgagactgagggtggttcatcatggtgtcaccaccctcagtcgcctacggcgacagctcccgccagcgggagcaagcacccctcacacaacacaataaagggcggggatcttgcgatcctcgccctttatttccgaactacctaacggtatccgttcagtgagtcagactcacttcttggacatctcggtgtaggtcgggaggttctgccaatcgaaggcgtagccggacttcacgttgagggaagccgcaccgttggcgttggagtagtacagcgggatggccggaaggtcgttgaggaggatttcctcagcctgctggtacagcttgttggcgtcatcgacggacttggcggcggcggcctgcttgcacatgccgtcgaaggccgggttcttgtagtcaccgtcgttggagccgttgccgtcagcagcagcggtggagtacagctgccacaggtagttctcggcggacgggtaatcgggctgccagccggtacggaaggcgcccttcatctgacggttggtgacggcgtcacggaattcctggaaggtcgggatcgggttggtggccgcgtcgatacccaggttgttcttgagctggttcacgacggcgtcgaaaatcggcttggcaccaccatcggcgttgtaggagaaggtgagctggccgtcgtacttggagatggcgtcagccttggcccacagttccttggccttggaggcgttgaacttcaggttgtcggcacccttgagggagtcggagtagcccggggtcttcggggaggtgaactcggtggcggcggaggcgttgccgttgagcaccttgtcgatgagctggtcacggttgatggccatggagatggcctgacgacgcagctgaccttcctcgtcgttcttgaagtgatcaagggaggacgggatggtgaaggtctggatgacggagccgacctcggagtaagcctggaccttcttgtcggtcttgaaggtcttggtgaaggcggccgggacggattccatcacgtcgaggttgccggcctgaatgtcacggtaagcggcggagtcgtcggtgtagaccttgaaggtcacgccatcattcttgggctgctcgttacccttgtagtcagggttcttgacgagggcgatttccttgttgtgatcccagtggtccagcttgtacgggccgttgccgaccggcttctggccgaaggccttcgggtccttgtagaaggactcaggcagcggggcgaaggccgagtagccgaccttaatcgggaacacggagtcggactggttcaggtcgacggtgaaggtggtgtcgtccacgaccttgaggccggagagctgctcgtcacccttgaggccatccttctgcagatcgtcatagccggcgatggcggagaagaaggaggagcacttctgggcgttcttggcgttggccacgtaggaccaagccttggtgaaggactcagcggtcaccggagtgccgtcggtgaacttccagccggacttgatcttgatggtgtactgggtggcgtcatcgttcggggtgatggactcggccacttcgttggaagccttgccgtccttgtcgaaggagaccagacgggagaacagcaggtcgaccggcttgccgccgccggtttcgttggtgttgcccgggatcagcgggttctgcggttcggagttgtacgcagtgatgatgttggagccagcggtgtcaccggaggcagcgttgctgttggagccgccgcaggcgctcagcagcatggccacggagcaggccatggcagcgaaagcaagagctttcttcttcatatgatttctcctattcattaggttgcaggacgtctcagccccgcctcatgcgaacgggactggattccccgtcacccgtgagacttgcatctcacgatgtctcgaacaatccaacccgttgctgattgcctgacatttttgcgcacttgggagacaaccagttgcttttttgttacgcctatgtaaaatcatggtccatttaccggctatgttcagcctttgctaagtttgttaaccatcgtccacatagtggtcatgctcgggggaatgcctgaccgtaacggtttttgagctgctcgatggacacgtgcgtatagcgttgtgtggttttcaaggaggaatgcccaagcatctcctgcacttccctcaaatcagctcccccatccaacatgtgcgtggctgccgaatggcgcaaggcatgcgggctgatgtccggaacgcccgcttcacgtgcggccttatgcacgatttcacgcgccacacgctggttcagccgtttaccacgcataccgaggaacaaggctccctcgtctgaagaaataccgttcggggggacggctttttcaatcgccaaacgagccagcgctggccgtccataatcgatccagtcctgcaatgcctgctccgcaggcaatccaaacggaaccacccgttgcttgttgcctttaccggtcactctgacggtgcgattggaaaagtcgacatcacgaatatccaaagaaaccaattcggccacgcggatgccggtggcatacagcaattcgagaatcgccacatcccgctggcgttctgcgatttccctcgcccgatccgcgctccgcccacgagcggaatgaggaccatcagccgaggaatcattggagatatcacgattcttccgttgcagggcctcactatgctcagcacaatcaagaagctgctcggcctgcgattcagtaagtacagtcggcaaggtgttaggaatcgagggggtcattaatgtggcggccggattgacaccaaccacgccatgctcatagccccaagcgaagaaacctcgtaccgctacggttttgcgggccatactgcttctggcgtgattgtgcgattccgttgccatccaactacgcagatcattcagcgtgatttcgttcaggctgaccacaccacgcaactcgaataggtggagacaagcctcaatgtcgcaacgatacgcttttagcgtattagcggatagcccacgattagctctcagataggaaataaaggagtcgacgtcactgctaaaccgcatacttatcgctcctctgtcgagtactgtcagataaactataggcacagagcggccccatacacgggtatcccctttgccgtgacaacgccaaccggccttgactcagggaacgaaaccgtattggccgcaaagaaacgaacttccatgatgattggggcagtatggcacggcacagcgcaaaaggcgtcgcacaaagcatcgaacaggccgaggaacagcacgaccatgtggtggcgcgggccgtagatctgacgaaaacctacggtgacgccgacagccaggtagtggcgctggatcatgtgaacgtggaattccagcgcggccagatgaccgcaatcatgggcccgtccggctcaggcaagtccacgctgatgcattgcatggcgggactcgaccaaccgacttccggcaaggtgtttatcgaaggcctcgaagtgtcttcgatgggccagaagcagctcaccgacttgagacgtgcgcagataggattcatcttccagtcgttcaatctggtacccacgctctgcgctgaagagaacatcctgctgcctttgcaaattgcgaagaagccgattgaccgcgattggttcaagcaggtggtcaaggtggtcgggctggagaagcgactcacccaccggccaagccagctgtccggcggacagcagcagcgcgtggcctgcgcccgtgcgatgatggcccgcccgtccgtgattttcgccgatgagcccaccggtaacctcgattctcgttcttcacgtgaggtattgggcttcctgaagcagtctgtgaccgaatatggccagtccattgtgatggtgacgcatgatccgcgcgccgcctcctacgctgaccgcgtgctggttttggccgatggccatattacgcaggatctcgaccaccctacctatgagcagattcttgaggtctttgccgatgacggtgcggatgaggccggcaaggtggcacaagcatgatcaaaatcggattgcgcgacgcccgcgcgcatttcgggcgattcgtcatgtccatcatcgccatcgcactaggcgtgagctttgtggtcggctcgttctgtttccgtgaaatgatgaacaaccaggtctccgacatgatgggcaccagcgccgaccatgacgtatatgttcgcggctcaaaagaagtcaaatccgactcctccggcctgatggccgcctcgtcttcctcgaaaacctataacaccatcaacgtcgatctggcctcgaccatcggcgacgtcaagggcgtgaaaagcgcggaagtcgtgtattccgtgtccggcacggtgctggtcggtaaggacggcgcggccgtatccaccatgggagcgccgacattggccgtgggctttggcaaggatgtgccatggcgttccgccacattcacttcgggcacagaccccacctcggacgacgaaatcgccttgcattcctttgccgccgagaaggcgaatctgaaggttggagacaaaaccaaagtcgtctacccggacgggccgaaagacgtaacggtaaccggtatcttcgatctggattcctcgcttgccggtgccatcatcatcgatattccaccatctttggccaagacgtacgccacccagcaaagcgacgacccggataagaccgaccagatcggtatctacggtaacctcaaaaccccgctggacgagcaggcgcagcaggaactcgccgaccgtatcaataaggcgttgcctgccggctccaaagcacatgccatcaccggcaaccagctgcgcgacgagtcgacccaatccgcgcaggaggcactgggcttcgttcagccattgattcttattttcgcggtaattgccctgttcgtgggctcgttcatcatcgcgaacacgttctcgatgatcgtgcgcgaatcaatgcgcggctacgcagtgctgcgatcaataggagcctcccccgcccaggtgttcaccacggtgatcgtgcaggcgattgtgctcggtgtggtcggttccggcatcggtatcgggctcggctggggcatggtcaaaggcatcgtcgcgatgatgggtcagatgggcacgccgatgaccggatcctcgaatccgagcgtctcggacatgctggttggtctcgcggtaggcctgatcgtcacgctgatcggcgcggcgttgccggccagtcgtgccgcaatggccccgcccattcaggcaatgaacgagaccgtgaacccggagaagccagtattgactcgcggcatcatcggcaccacgatgattgtggtgggcgcactgacctgggcctggacctgccgcatcgcagtggcggacggcgatccgacgctaatcggctggctcaacgacttcgcttcctggaccggcaccggctggccgcttggcgtgggcgcggcgcttatcgtcattggcgttattgtggcgggcccggcttgggtctcccctgccggcgcggttttgggctggattccggcgcatgtgttccaggtaacgggccggctcgccactcgtaatctctcccgacacaagcgccgcacctcgaacacggcggcggccctattcgtgggcgtggcaatcgtctcctgcctgagcgtggtggccacctcggccaaggcctcggtgaatgacatcgtcgacactggattaaaggctgatttctccatatcgtccgcggcatccggccagattcccgataatgccgtcgaagcgattaaaggtgtagatgggctgaagtccgtgtcttcaaatcgaatgattttcggtgcgaagtatgacggcaagcaggtcaagggcatgacgttcgcggctcaggattccctgttcactgacgtgttcgcgcccgaaatcattgcaggtgacgcgaataaagcattgcgtggcggcgaactggtggtcggcgaagacatcgccgacgatcaaggatggaaagtcggcgacaccgtaaaggtgtccaccgagaacacgacggtcgacgaagaggccaccgcccaggcacaggccgactatcagacacaggttcaggctcaaattcaatcgttgaccgaagaggcgcagaagctggcattggctggcgatgcggcgggagcgcaggccaaatccgatgagattcagcaagtcacgcagcaggctcaaaacgtggatcctgcaactttggtgaaaaccaagcaggtcacggtaatcaagaagctcaaagtcggtgcgatcatctcgaattcggtataccgttcgtgcgtgttcgtcaatgatgatttgggcgaccagctgggaaccaagcagacgatgttcaccatgcagatgtatctggtggccaagccgggcgagaatctcgacaagttggagcagcgcatcaagaaggcggtcaagccgtactacgtgatttcggtgatgaaccgcgacgaatacaagtccacgatgggctcgatggtcgatcagattctgttggtgctttatgcgctgttggcattgtccattgtgattgcgattttcggcattgtgaacacgttggcgttatccgtgtccgaacgcaccaaggaaatcggtctgttgagggccatcggcacgtcgcgcggccaggtgcgaggcatgttgggcatcgaagcggccattatcgccgtgttcggcacggtgatgggcatggtggtcggcgtcgcggcaggcgctgtgattcgcgcggtgtacgaggccgacggcctgagtgtgctcagcattccgtgggatcagctcggagtgttcctcgtgctctcgattctggtgggtctcatcgcctccgtctcgcctgcctctcgcgcgctcaagcagccggttctggatgctgttgcctcggagtaactgctgtcacctcgcattattcactgatatctcggagtaacccaataatctcgtcatcattcatctcgcccagcgacagatattcaggaaataacccctttcgtcctgaacttctgtcgctgagtcgcagtcagcaacaggattttagggtgaagacgtttgtttcctgaatttctgtcactgagttactgtcagcgacagtatttcagggcgaagccgtttatttcctgaatttttgtcgctaagcagtcgttacggcctcagaggcgtgaccggacgctccggtatcggcttcaatgtggcgatttgctcctgatgaatcgtcacgttttgtgctggacgagagccgttggccgcggcgtcacgcaccagttccaacgtgtagccgtcccatgagaccacatgacccacgtaatcgcggaatttcatacgatggtcagtgggatccacgccctcggtaacacgcaccaccactcgcgcgcctgttggaatctgcctgggcaacgtcataatcatcatccccttgccgttcccgatatatcaacttcgatacgcattccactgtactcgtcgtacctgtgagcaacggtattgactacatggcagggcgcagctgaataatcgcctgacgtgggttgacgaagccgatgatggcttcacctctgcgcgcggaaaacagcaaggtctgctgccaaccggattcaggaacggtaagctcgcgttccggcaagctctcggctgcaccgtcactcgcatgtgtgagtgcggacttgtactggcggaacgggttgccttcagcaaagaaccgaatcacgtcggtttcgtcgccgtcatgcaattggtcggccatatcagtcagacgcttggccatacggcgaagcaacgcttcgacattcaacgcatcctcctcgaccatcgcacgcgtgcgattagggtcggtcagagccacacgggtcatatccctccaacagccagcggccaatgcggccgcaatattgcgatcggggtaggcagacagttcgttgatcagcgcggtggataccacgtgtggcatatgggagatcattgccgcagctttgtcgtgcgtctcatcgtccagcacgatgagacggttgccaacacctttggtaatcaaagcggccacgtcaaggaatcgttgataattcgtggcactatcaacggtcaccgcccatagtgcatcatcgtacagatgcgggtctgcagcctgccaaccggacaattcgttgccggccatcgggtgggcacccacatagcactcccccaatccggcggcttcgacctgctcgcgaaccatgcctttgaccgagcccacatcagtgatggtggtacgcggatgttcgaccataagaggagccaacgagtcaagcattgcaggcatggctttcagcggattgcacaacacgaccacatccggctcagcatccatgagctcagccaatgtgcttttgcagaatatgccatctgcctcggcttgagcataaggatgcgggcgatggttccatgcgactacacgtatgccccgctcggccaggcgccgggcaagagaaccgccaatcagtcccagtccaatgattccgactgtatttaccacagcaattccctcctggcctcttcggtgtgctgccagccttctgacggatgctcagcatcgacatggacaccaccttcgggcaacatccatgcatcaaccggcgggctgggacgttcacgacgtgggtatacagccagagtcttagcccaatcaccatgttcggcaatttcttcgagcacggcatggaacttgggctcccgcggcgcggcatcaagcgtggcgatgaaactataagtgccatcgttcccctttatggggcgggaaatgaagctggtcatattcagtcctgcgtcacgcagcacatcaagcagatcggccaatacaccaggacctgtgaccagcggaatgaatgtgatgatggtttcaaaatcgtcggcattattgcggtgcgcgcgggcattgagatcctgaaccacatctcgcggagcaatgacaaggaattcagtgcgggctccctcgaaatcctgcacatgttcggcaagggtatccaggttgtacaactcaccacagatgctgggaccgagcgccagttggccgggctgcaaatcgcggcaggcagcggcattggacgatgagggctcgggcttgagatgatgttcggcgatgaatcgtttgcattgtgccagaccatgtgcgtgagcgctgacgatgccgccggtgcaatcataaatgccgtgacctcgcaccgtgaaagcattaaaggccacatccacactgacacgggcaaaacccgctacatcagtggcatcaatcagggcatcgaggttgggcaccacatacccttcgacgttgttttcccaagcgatcacgccccaaccctgacgcgattcgacggcttgcatgatggcaggtacatccggtagagcaacgaggtcaaagtccccgagcggtgcgaaccgattggcggccgtcattgccgcctgatgggtgaatgtgccctccgggcccaaatagaacagtttcatgcgtgccataaggttctatggtagcgggtttgagggcgatggctgcgcttttgctcagcgatggtctctatcgggattgcttcggcataacgctgaaccagcgtgcgggaagaacgagcaggatcacttggacgagaatcaggccatagagccagatgtatccggcatgctgggtgaagaacggcatctcgccttggaatccggcgacaatcagcgccttgcctgaggtggtggtcagggccatgccccaggcagtcagggaagatgcgatgagatgcaaagccagaccaaccacgcccatgcgtgagcgggcacaccatgtcgacaggccgataatcaggaacgcaagaaccaatccgtatggaatgttcaattcagcccccatacgatgggcgaacgtgcccacaaaggcagatgccacgcccgccgcaatcgtgatcaatactttgaccagcacgttctgacgatgcgaccacggacgcaaatcggtattgctcttcacagtcatgcgtttcagtatagatatagacatgcccccgctggcggggctgtcgaacgaaatgagactgggggtggtttacgataaccaccccagtcggctccgccgacagccccccgccagcgggggcaattcggaatcacttaccctgctgggcggcgttctggcggcgctgcttggcgcgccacttgtaccagtcctcgcggccgaggatgatcttgcgcacgcggatggactcaggggtgacttccacgcactcgtcctcgttggcgaagtccagggactcctcgaggctcatcttgatcggcggggtcagggtttcaagcacgtcggcggtggcggaacgcatgttggtcatgtgcttggccagcgtaatgttcacatccagctcgtcgggcttgttgttcacgcccacgacctggccctcgtacaccggagactgcggctcgacgaagaagttgccacgggcctgcagacgctgcatggcgtacggggtggccacaccctgacgatcggaaaccatggaaccgttctggcggatggtaatctcgccagcccacggcgcatagccggcggacagggaggaggagatgccggtgccgcgggtggcggacaacagtgcagtacggaagccgatcagaccgcgggacggcacggtgaactgcagacgaacccagccggagccgtggttggtcatgccgtccatgcggcccttgcggtctgccatgagctgggtgacggtacccatgtactcttccggcacgtcgatggtggtgttttccatcggctcgttgaccacaccgtcgatcttcttggtgaccacctggggacggccgacggtcagctcgtagccttcgcggcgcatctgctcggcgagcacggccagcgccagctcaccacggccctggacttcccaagcgtcggggcgatcggtgggcagcaccttgatggacacgttaccgatgagctcgcggtcaaggcgatccttgatcatgcgggcggtgagcttgtgatccttgccttcggtgccggccagcggggaatcgttggtgccgaaggtcatggagatggccgggtcatcgacgtggatgagcggcagcggcttcggatcgttggggtcaacgatggtctcgccgatcatgatgtcgttgacgccggcgacggccacaatgtcgccggggcctgcggactcgaccgggatacggtcaaggccctgggtgcgcagcagttcggagacgcggaagttctcgagagagctatccacacgggacagaccataggtcttgcccttctcaagggtgccgttgtagatacggaccaggccgagtcggccgaggaagtcggaggagtcgatgttggccacgtgagcctgcagcggagcaccttcttcatattctggagccggaatggtggagatgatggcttcgaacagcggctcaaggttgtcgttgtccggcaggcctccgtcggcgggctggttggtggaggcgtaaccggccttggcggcgcagtagatgaccggcatttcgagcagctggtcgagattcaggtcgatgccttcgtgctgcacatcgtcggccaggccgagcagcaggtcggaggtttcgccgacgacctcttcgatacgggcgtcagggcggtccaccttgttcacgcacaggatgaccggcagcttggcttcgagtgccttacgcagcacgaaacgggtctgcggcagcgggccttcggaggcgtccacgagcagcacgacgccgtcgaccatggagataccgcgctcgacctcgccaccgaaatcggcgtggccgggggtatcgatgatgttgagggtgatgccctccgggtggccgtacttggcagccagcgggccggtgtattccactgccgtgttcttggcgaggatggtgatgcccttctcgcgttccagatcgttggaatccatcacacgatccggcacttcctcacgctcgctaaacacgtgggactgctgaagcatggcattgaccagggtggtcttgccgtgatcgacgtgagccacaatcgccacattacggatatctccacgaaccgccatcgaaacctctcttaatactgattttcttgcgtaatcgttcggtacttgcgttctcgagtacttgctcttggatatctacctgtacctacacacaaaccgtcacgatgttactggcacaccttgacacacaacgggcccggctttctgagaattagtcacatgtcatctggcttgcgagacttgttgtattccacactctcgactcccctccctgaggggagctgtcgccgtgggcaactgagggggcgccaagtgcatccctgaatgtatccctgaatctcccctgaatcatccctgagtacagcatcgtcatgggtagttactgagtaacctgatatccaacgatagttactcagtaaccttcgcccaaggcaaaccgtctatgcaaaggggatgcggtatggcaatcagagaagcgctattagcactgttggagcgaggcccggccagcgcctatcagcttaagaaggacttcgaccgcaccatcggtctgacttggccgctcaatatggggcaagtttccactacgctgcagcggttgaaccgcgacggattgattgaagagaccgcgccgactactagcggatccaatgatgtcggcaccgcagcggccgcaccattatggcgattgaccaattccggcgcccaagagcttgaccgatggtggcgctcccccattaccccggaacaacgcggacgcgacgaactggtgatgaagctggccgtcgccgtggaaatacccggcctcgatgtttccgaactcatccaacaccaacgccacgctttgcagcaactgctgcacgacatcacccgactgcgccggcaaacaccgcccaccgaactcgccacacgtctagtactcgaccaccatattttcatcactgaagcggaattgcgctggctcgataccgtggatgagacccagctgcgagcacaactggcgcagcaccccgtttcggcacctctcacggcaagctcagccgcactcaccgccaccattcaatagtgcataggagcacatcatgacttctcccgttctttcttctctcccgcaatcttccccatgcgcgctggaattacacgacgtcactcgcgttcacggcaaagatgcacgtcgtgtcaccgcgctcagtcacgccaatctcacgcttcgcccgggtgaattcgtggccatcatgggccccagtggttccggcaaatccactttgctcaatcttgcgggcgggctcgatgtgcccacgcaggggcacgtgctggtcgaaggccgcgatctggccacactgtcagtggccgaacgcgcggccatccgccgcaaatcgataggctacgtgtttcaggatttcaatctgctgccttccctgagcgcagccgagaacgtgtcgttccccttggaattggatggctggaatccccgcaaggcacgtgaggccgcgatgcaatccctcaatgaagtgggggtagccgatatggctgatcgccgacctgaagacatgtctggcggccaggcgcaacgtgtggcgattgcccgcgcactggtcggcccacgccgtctactactggccgacgagccgaccggagctctggattccaatgccggcatgacgattctcgaagtgttgcgcacccgcgcagatcgcggcgcggccgtactgctggtcactcatgagcctcgcttcgccgcctgggccgaccgcacggtgtttttgaaggacggccgtatcatcgatgaaaccggctccagcaatatggatgatttgctcaaccttgaggaaaggggagcatgatggcacgcgcagccctcaataatcttgccaatgccaccgtcggtcgctctgcccaaattccccatgccgctaggccaagccttggcgcacgttgcaaccggtatcgggccgcgctgcgactcggctggcgcgacgcactacggcacaaggcccgcaccctactgtccttgctgctggtaatgctgccaatcgccgcaatggtggcctccatcggtatgaccaccaccataccgcccaccagatcgcgtgcgctggcgacaatcccggctgatacgcaggcggtcatcaccgccaccgccaggccccgcaccggccaaccgttccggcagtcacccgaaagcggcggcacgtggcaggacgatccctcccagcagccggcctcggccgccgagcttgcgaagattctgccgcaacaggatcggctgctcccgtattggcagtcgcccgaactcatcgccatcaccggcaccgcgttgcaacccggcgaacagaccaaggctgggatcgacgtgaaaagcgggaacgacattgatctgaacgcggcctccaccgcgaccatgaccgaggcttcacctgaggcattgcaacgaatgttgccgaagctggtcaagggttcggcgccgcagaataatacgcagattgtcatcagccgcacattggcggataatctcggcgcttctctcggtagcacggtgacgttcgtcgctccgccgttcgatggctggatgagcctggacgggcgcatcggcgaggcggtggccgacactcagcgtgcttggacagtcagcgggctgaccgatgaatccgaagccgcggcatggggcttggaaggctggatgtcagccatattggaatctgatggcgtcggcgtggatggccattatttggtggtcggtccagagccggtcacgtgggcgcacacccgcagcatgaacctgttgcaggccatcgtcatttcccgccatgtgctgactgacggctatccgcccgcatcgcagctctacccgatacagatcgatgcggctaccatgttgaaccacatggtcactgtggtcatcaccatgctggtgggtatgttgctggtactgtttctggtcacgcccgcgtttacggtgtcggcagatcagtcacgtcgtgtgcttgggctcgcggccgcatccggtgctgcaccacgtgacctcagtcgaatcatttcctcgcaaggtctcgttatcggcgccatcggtggcgtgctgggctcggcattgggattcgcgcttaccttggcggccggccctgcgataggtgcattgcgcggatccacgccgctggagatcctgcacggattctcgtggagctcgctgccgatgggtattgtcacggcaatcatcattggatttgccgcgacgattgcgccggctcggcatgtggcgcgtatgcatccagtcgatgcgttgaaggatcgcccgacaagagaggaaatcggctacggtgaatccgcgaatggcgtggatacgaagcttcgccgtaatcctttgagactgctccgtgttgcggttggtccgattctggtcttggccgccatcgtatgcgccgcgctcagtctgacattgccattgcccacgctggccgatcacaatccgggcgcggttccggccggaaccgaagcgcatatggctctgcttgttgccacgattttgttggctgtcatagggcttgcgttgtcgattcgcacttttgcacggtggtgcggcaaagcgagttcccaactgaacatcggcgcacgcctggcactcagggatgcagccgagcatcatcgacggttcgttccggcggcatgcgcggtgctgattaccatgtgcatcgcctcgtacacactggtaatcaccggctccatggtggcggaccagcgaaattccacgatgacgatgacgtatggaccgtcggggatggccattggggccgacgtgcatgtcagcaatgagttcgaccgtgctgtggtgtcggatgcgatacgccggcttggcaaagagacaccgatacgcgctcattacccggtgtacaccgaggatgtcaagcgatggtcaaagctcaatgatacgaccgaagtcgattccgacaagttgaacgccgaacacggctacatgtatgccgctgcattgctcccggccggtcacacttgtgataacccaacgatccaagagcaaccggacacgtccacatgggtgggccaggatgccgcttcggccctgtatccaaacgttccgatacgttgtgtgccgatagaccgatcccatcagccaacgtattcgaatatactgccgagtttccgcggcgtgaatctcattatggatggcaatgcgatgcgtttgtccggcttcccgaacgcggatgaggcggcacaggtgcttgatgcgggcggtgtggtggtcggcgatgccggcacaatcgacgcgggaggtatggtgcgtgtggccatttcgccaaatccggcaattgcaaacgaatctcaggccacacatatcgagaagcgcaaggccatctacgtgcgcggcgcgtacccgctggtgatgagcccggcaacagcacaggcgctcggcatcaaacaattgcagtatctgggtgagtatctagacttcgccggtggcaactcccccgttaccgtaaagaaggcctcagcttatgcaatcgaaaatctgccgctggcatccacgagcactgacgggaatcgcctgccgtggggtgacaatatggcattggtgcccattggcctgttggcattgctggcactgatggccacgctcgtttcattgctgctggctcgcacgcaggcccagcgcgacatggccacgatggtcgctgtgggcgcgccaccccgattcctcagacgttacggcctgacgcaggctgcggtgattctgctggccggcgcgccagtgggcgtggtatccggcgtggcgttgggatggctgcatgtggcatggaaccacaggatcggcgtggacggtcattggctggaaaccgtgccgatctggggattgcaggcggcgctggcattcggcgtagtggcaaccggactgctggtggcgtggctggtcacaaaaccaccgcgcaatctcacccgtcgttccctcgattgatcagtgacatacggcaactcttgccgtgtcattcgggagctataagacaaaaagtggcccacacattggtgtgggccactttagtagtgaaggctgaagtgtaatcagtcttcgagattgaggcctttgcgctcgggcaagcagagggctgctatgcaggcgaggatgaaggcggccgcgaagatgatgaaggccacggccttgttgccgccggacagggtcaggaaccacggcatcagaagcggcgcaatgatggcggcggtgcggccgaccgcggctgccgcaccggcagcggcaccgcgcaaacgagtcgggtagatttccggggtcacggcgtacagcacgccccatgcaccgaggttggaagcggacagcagcatgccgaacacgagcacgagggccacagagccggcctgcgagaacgcgaaggcggccacggcggagacggccaggaagatgctcagcgtcttgcggcggccccagacctccacgagccatgcggccagaaagtaaccgggcagctgggcgatggagatggccagcgtgtagccgaacgacttggtcagggagccgaactggtcggcgagcagcgacggcatccacgtgaacgcgccatagtaggagaagttcacgaagaaccacgtagcccagatggcgacggtacgggccaaatacttggaaccgaacagttcgcgcgtcttgatcttcggtagcggcttgcccttgggagaagcaaccggctgcactcccccggcttcctcgaaatagcgcacggccttctcagcttcatcctcgcgtcccttggcctcgaggaatcgcacggattcggggatatgcacgcgggtgacgatcgcgtagagcaacggcagcgcgccaatggccaaggcccagcgccagccccagtcgccggtgttcgggatgacgaagtagccaatcatggcggcgatgatccagccgacggcccagaaggattccaacaacacggtcatacggccacgctgcttggtcggcgagaattcggacaccagtgtggaggcaaccggcagctcagcaccaaggcccagtccgatgaccagtcgagcgccgagcagcatgccgagagaccaggacaggcccatggcgccgttggcgataccgaaaatgatcagcgtggcggtgaacacggttttgcgtcccacacggtcggcgatgaatccgccgagagccgcaccgatggccatgccaacgaagccaatggagagtacccatgacttttcggtcggggtgaggttgaagtgcgggtcggcggcgatggcggcgaccacaaaggagacgaggccgacgtccatggcgtcgaatgcccagccgacgccggaggcgacgaggagtttgcgatgcgccttgttgaacggcagtcggtcgaggcgctcgttgcgggtgagctgcgcgggttgcgctgaagtggtggtgctcacggcgtttcctttctggtagcgggggcagaattcgcgatatctgcgaaaaccaccccaggtcagctttgctgacagcccccccagccagcgggggcaagttaatatcgggtgaggtcggtgtaggactcttcgatggcgaggctgatgcgttcgacttgttcacgggtcaacggtgtgcggaacgtcatacgcaatgccgatttagcaatggatggttcgagccccatagccagcagagtcggcggaatttcgtgacgtccaaccgcgcaggccgaaccggacgaagcagcgatgccgcgtgcatccaaatcgacgagcagggcttcgccggtgacgccggggaagatgaacgaggcgtggcccggcaggcgacgctcggggtcgccggtcaggtcggcacggggagccacgcggcgaaccgcgtcaatgagcatgtcacgggaggcaaccagttcgcgataatgcgcctgcatgcgcgcattcgactcattgagcccgatggcaagcgccactgcaccggccacgttctgtgtgccggaacgcaatccacgttcctgtccaccaccggaaagcaccggttcgatggatgtgcggccacgtaccagcagcgcgcccaagcctttgggcgtgccgaacttgtggccagaaacggatagagcatccacatcccaatcgcggaaacgaatcggaatctgcccggcggcctgcacggcgtccacatgaatgggcacgccatgcttatgggctatgcgaaccaactcctccaccggctccacagtgccgacctcgttgttggccagcatggtggagacgagcgcggtgcgatcccccgcctcgccgtcgagctcgtgttccagcgcgtcgagatcgagatgcgcttgcgcatccacgggaatatgcacgacgtcgaaaccgaaccattcatgcagccatgccgccgattgggccacggccgggtgttcgatggcggagatgataatgcgtgggcggtggtttgtcgtctgctctccagtctgcgataaggcggacgggtcggccaggtcggtgccgaactgctcgccatcgtcttcggcaagtccatagaacggctgtaatcccaactgccgcatacgggccatggcaatgcctttgatggcaagattgtccgattcggtgccaccggaggtgaagatcacgtcatctggccgggctcccaatgccgcagcgaacgatgcgcgtgccgcatccagcgcacgggccgcggttttgccgggctggtgcacgctggccggattggcataggcgtcggtcaggaacggagtcatggcttcgagaacggccgggctcaccggttcggtggcagcggcatcgagatacagttcgccggcttcgctggacgtgttgggagtatcggccatgatcagatccagtccaatccgaggtcgatgctgcgcacggaatgggtgagcgcgcctacggaaatcacgtccacaccggcggcagccacggccggaacacgctccagattcatgtttccactggcttccacgatggccttgccatcaatgagttctactccgcggcgagtgtcatcgagtgagaaattatccagcatgatcgtgtctgcgccgccctcgagcacggcaggaatctgctcgaggctatcgacttccacctcaatatgcgtggtgtggcctacctgttcgcgcacgtgacgaatggcaccggtcaggtcgataccacgtgcggcgagcgccgccagatgattgtccttcatcatgaccgcatcggacagtccgtaacgatggttgtggccgccaccgcagaccacggcatacttctcgaacgggcgcaagcccggagtggttttgcgcgtatcgacgatgcgggtgcgttcgtaacggtgaggacgggtgaccgatccgtcatagttgtcactgtagatggcgttcaccgcgtccacaaaagcggcggtcatggtggcgatgccgctcatgcgctgggtgaagttgagggcgatgcgttcggcggtaagcaggtcacgtaccggaccggttacggtggcgagcacttggccggcttggaatcgttcgccgtccttgatggcagcggtgacagtgacggctgggttctgcgtggtgaacgcagcgcgaaacacctcgatgccgctcatcacgccgttttcgcgtgcggtgagatgcgcagagccggtttcgcccgcggggatcgtggtctcgcaggtgatgtcgccgtagggtgcgtcttcggcgagcgctgcttcgacggcggtatggatgatgtgttgcgtaagcatgggtcaatccttgatgtaggcgacggagtgagcccattcgtcctgcggctcagcataatcggtgcgggcgtgggcgcctcgggattcggtgcggacgagcgcggcggtggcggccacataacccacggtgagcatattacggttctccagtgcttcaacatcggccacgtcgacctgtgcgtttgctgtagcaagtccttgaccgagttcggcgatggcggtttgcagcccatccgcgtcgcgcagtacgccaacgccatgccacatggtgttttggatgcgggtgcgatcccacacatctgcagctgcagcatcatctgtgagcaccggggtcttcaatgcaattggcttatgcgtgaatgcttcgccggtggcggagttcaggaacggttcgggagcccagaccgtgtcatcaccgtccgcgactgcggccaaaccggcacggcgaccgtaaacgagtccttcgagcagtgagttggaggcgagcctgttggagcccatcacaccggtacgggcgcattcgccggcagcatacaggccggggatcgaggcgcgagcgtccaaatcagtgcggataccgcccatgtaatagtgcgcggccggtgccaccggaatcagctccttgctccagtcgaagcccagcgagcgcgtgtaggcgtcgatggtcgggaatcggtgggccaggaaggctgccagatcgggattctccttcgccatcggcgaggcatcgagcatgaccggcttgcctccctgacgttgcatcacgcggaagttctcgcgggccactacgtcgcgcggagcaagttcggcacgcggatccacgtctttcatgtatcggcgcccgtgctcgtccagcagtaccgcgccttcgcctcgcacggcttcggagacgaggaagtgctcgcccacggccatggcggtgggatggaactggtagaactccaagtcggcaacctgtgcccccgcacgccatgcggcggcaacaccatcagcagtggcaacctgcggattggtggtgtacgggtacatgcgtcccgcgccaccggtggccagaatcacgcggtcggcggcaagatccttgtcctgcccgtcaatcagcagccggacgccggcaatacggccgtcacgcacgataaggtctttgaggaaggcatgttcgatgatatggatacgcggattctcacgcaccatggcggagacgtccaactcaagcaccttgcctgtggcgtctcccccggcatgaaccacgcgggcacgagaatgcgccgcctcaaggccacgtagcatatgcccctgtgcatcccggtcgaagtgcacaccggccgcggcaaactcacgaacacggtcagctccctcacgggtgagaatgtccacggccttcgggtcgcacagaccgtgacctgccgccatggtatcggccgcgtgcagcttcgggtcgtcgtcggagaagatggcggcagcgatacctccctgcgcatggtaggtgtttgattccaccagttccgtcttggtcaccaaggtcacgtcatgaccggtaccggccacggccagtgccgcggacagaccggcgacgccggcgcccacgacgatgatttcaacgttgctcattgtgttgctttcctctgttttttggttcgctcccgccggcgggagccggagagaggtcacgggtgaacgcgcagcatgcgctccaatgccaccttggcttcgcgggcggtgttgtcatccacgatgatacggttgaccacattgccctgttcgaggttttccagcgcccaggccagataggccgggtggatacggtacatcgtggagcacgggcagaccaccgggtccaggcagaacacggtcttgtccgggtactgcgcggccagacggttcaccaagttgatttcggtgcccacggcgatggcggaaccggcgggcgcgttggcgatctccttgacgatgtatgcggtggagccagtgccgtcggcggcgtcgaccacctgcatcgagcattcggggtgcacaatcaccttgacgcccgggtatgccttgcgtgcacgctcgatctgttcgacggtgaaacgctggtgcacggagcagaagcccttccacaaaatcatcttggctcgggcgtaatcggccgggtcggaggcaccgccctgagccttgaacggatcccacagcggcatctcgctcagcggaatgcccatggcgcgggcggtgttgcggccaaggtgctggtcaggaaagaacagcacgcgcttgccgcgcgcgaacgcccattccagtacggcgtgcgcgttggaggacgtgcacacgatgccgccgttgcgtccgcagaatgccttcagcgccgcggaggagttcatgtaggtgaccgggataatctgctgacgaccatcggaatccggctcggtgccgcagatctcgccgagctgatcccagcattcctgcacctggtcgatgtttgccatgtcggccatggagcagccggcggacaggttgggcagggtcacactctgttcgggggtggagaggatatcggcggtttcagccatgaagtgcacgccgcagaacacgatatggtcggcgtccgggcgttcggtggcgttcttggccagctggaaggaatcacccacaaagtcggcatgcttgataatctcatcacgctggtagaagtggccgaggatcagcagtttagagccaagacgctgcttggcgtcggtgatgcgctgctgcagttcctcatcagaggccttgcggtattcgtccggcagcacctgctggcgcggcgcgttggcgggcagacggtcgagcatcgaggcaccgggaccatagctgggtgtggtggtgtcgaagtgccacgggtcctgggtcagtcctgcatcgcaggtgctttgcgcgcccagcttggcgatgatctcgtcaacggagggcgcaatgaatgatgcggtcatagtggttcctttctgtaacgtctatgcgccgtgcctgcaggcatggcaaaaatcaaatctgtgcggatgggctcaatgcggcaagcacatccttgcgttcgttgcgcttggccattgccgcaatgccaccgccgtcgaattcatgcggcgttccggtatgggcaggtagctgaggcacatatcggtacacggctgccggccgctgacggccttcacgcactttctcaccggtgtcttcaagatcgccggaggagagcattttgcgacggaaattcgccaaatcaaggctttctccggcgatggcctcgtatacgccgtgcaactgccgcaaagtgaaggtgggaccgagcagacgggtggccacgtcagagtattcgattttggagcgcaaccgaagcagtgcgtagtcgataatctcgcgatggtcgaaagccaacggcggcagctcatcctcggggaaccagcgcacattatcgccatcctcgaaatgcgcggcctcggcctggcctacgagcgcccagtacacgacggagaccatcggcaatccaccatgggagcgctctggcccgccaaaggtgtacagctgctcgaggtagcgaggatgcagcgcagtagttgactccaatgcggagtaagcggactgttccagcgaccaatcggacctcaggtcgcctccgggcagagcccaagtgccgaggaaaggctgacggactcgcttgaccaacggcaaccacagacgggaatgaggtgttccagctccggtctcagcagattcggcttgcgttgcgccatgttcgggcatgtcatcaggaccaagcgccaagatcaccacggacacaccaacctgcggtggtgcactgcggcgctccgacacattgccgaatcccatgccttgcctctttccagtgaaatattctttctggtcagacagcatagcactacttatagtcataatgactataagtcacaatatatgcgagaacagtaacaaaaacggtctgcattaccgcagaccgtgctgtcaggaaaccggctcctcgtctgattcgccgggtcttgtcatttccgccacagacggcaggaacggggccaacgatggcaactcgtcaaggctattgagtcccatctggtccaggaaaaactcagacgtgaccagcagcgctgcacgggaatcagggtccatgccgttctctgcgataaggcctcgcacggcgagcgagcgaatcacgccatcggagttgacgccacggattgccgccacctgcgcacgggtgaccggttgccggtaagccacaatagccagcgcctccaaagccgcctggctcagccgcgcggtctgcccatcggtgacgaacgcggagacgaccggctcgaattcggcgcggttggcgaactgccatcctcgtgcggtatgacgcagttcaaatcctcgcgggcgaatgccacgagccgcatcaccctcatattcggcacgcagtgcctgcaatgcatcttctacgtcgctctcatccaccaccagcacacgggccatatcctctacagtctgtggctggtcggcgaccataagaatggcctccagacatgcggccagcccgccgggaaaatcatcgacggtaaagtccacatattcgggacgcgactgctccgctacttccgtctgcccattatgttcgtcatattcgttgcgctcgcccatcggtcacctctcttacgcaaaatcgccttcagaaatgttcacgtcgctcatggcatcatccacaccggcgacccatcgcagatgcagctcctcgaacggcccattctgccgatattgcagcacaccttgtttgaagaacaccagcacggccatgaaccgggcaaccacctcgatacgggatgcgcaatcctgggtcagctcgctaaatgacatcgattgactaccagattccaaagccttgcgcaatcggtcacgcaccaccacggattgcgcccgcaaatcgaccaacggcacatgcagttggtgaaccgacacctcggaggccggtgcattggcgatcacctgtgcggcgagtttcgccagttccgcgggcgtgagcatccacacgagctcgggcagcatggcctgtatgccctcatccatataagccgggtgggggaaccgcccggaattggcggcgaatcgcgcgcggaaatcgccggccgcctgcttgtaggcgcggtactgaatcaggcgagcgaacagcagatcgcgttcgcgcagtgcctcgagactctgctcgtcatgctgattctcctcgccaccgggcaggatagccacgcttttggcctccaccagaatcgaagcaacatccaggaacgcactggcctcgtccatgttcttcgtgaagtcaaggccacgcacataagccaggaattcctcggtgattgaggagagcgaaacctcggtcagttcgagcttgttgttggcgatcatgccgagcaacgcatcgaacggcccggaatagacctcaagattcacctggaagccggagcctatggcggcctcgacttcctcctgctggcttacgagagtttcgctcatcaggccacaatgccgcgagacacgagctcgcgggccacctcgcggtattccttggcggtcttgtgcccgggggcgtagataacgatgggggccgcagccacactggagtcaggcaacttgatggatcgggagatgaacgtgtggaacaccttgttctcgaacgcctcatagatacgctggcatacttcctcgcagtggagggtgttggtgtacatggtcaccagcacgccgtagacctccaacgcgggattgatgcgggactggaccttctcgatggactgcatgagcagagccacgccacgaagggcaaagaattcggcggccaccggaatgatcacgccatcggctgcggccagggcgttcaccgtgagcaggccaagcgaaggctggcaatccacgatgatgacatcgtattcggccttgagcttgcgcagcacaccgttgagaatctgttctcggcccacctcggtgaccagctggacttcggccgccgacaagtcaatgtttgcaggaatcacatcgatgttgtcgaacgcggtgtgctgcaccacatcatggggatccacagacatatcgaacaatgcggtgtaaatggtgctctccacggtattcgcattgatgcccaagcccacggtggcggcaccttgcggatcaaagtcgacgataagcactcggcggccatactgtgccaaagctccggcgatgttaatggaactcgtggtcttgcccacaccgcccttctggttgcacatggcaatgactcgagccggaccgtgctgctgcaacggttcgggagccgggaaggtttcgtattcacgtccaagaaaatcggtaggcatatcgtctaccttatcaatatccgtgttccgagatggtgcagcgacatacgtttcgtccatcggcaacgtaccttggcggaatgtgctgctgccgcgacgatctgccatgcctgaaccttccatcaaactctgatttctcccgactagcctactcttatccgttcgctgccaccgttaccacatcgcgccacgccagtatgccgaaacaatccgtctcatcgccgctaacgcgctctgggatgcgcggtgagatacgtttcgatcagagcctcgggactcacgtgcgtatatatctgcgtggtggtgacgctggcatggcccagcagttcctgtacggtgcgcacgtccgcaccgccctgaatcagatgagtggcgaacgaatgccgcagcgtatgcggatgcagcggcttggtgatgccggcccgctcccccgctgttttgacgatttcccataccgattggcgtgagatgcgtttgcctcgcttgttcagaaacagcgctcgacgttcagggactttggccgttgatctgcgttccagctcgcctcgacccgcgttgagatacgccacgactgagttacgggcataactgcccaacggcaccagccgttgcttggaccccttgcccatcaatcggacgaccttctcctcaaggtcgatgtcgtccagattcgtgcccacggcctccgagacgcggcatccggtggcgtacatgaattcgagaagggccttgtcccgcaacaccaccgggtcggtggaaccgccgacggctgcggcatccagcagccgggacacctcgtcaacgctcaacacgtccggcaacacactggcccctttgggggctttgaccgaagcggccacatccgccgataccgcatgctgggccaaggcaaaacggtgaaattcgtggatggaggccaatcggcgggccttggatcgcgcggattccccgtccgcatcaagtgcggcgatatagtcctcgacatcctgtttggctatatcatccggcttggtgatgccatgggtctgaagccaggcgacatatttattgaggtcggattcataggcggagacggtggctttggcgagtccccgttcgatgccgatatgcacgaggaactgctcccgcagtgtgccgaatccgtcaacgcccataacggctcatattacgccatcgttctgtgccggcctcaacgccgtccgagacgtatcagacgtccgacgttttccgccgcgcgaatgagattccttggcccatcggcaatggcctcgttcaatggcatggcaccgggaacaatgccgaacaccgcatcgacgcccacgtcatagagttggtcgatgccttcgcccacatgtccggcaaaagcgaccacaccgatatgcggattacgctctcgcaccgccttggccactcccatcggcgttttgccgaatttcgtctgaaagtcaatgccgccttcgccggtgaagcagtagtcggcgccttcggcgcgctcgacaagacggaccgtggaagagacgatatccacgccggcacgcatcgtggactgggtgaaggcgagcagtcccgcgccaagaccgcctgcgccgccagctccgggcgtatgggccacatcgatgcccagttgatccttgatcaccgccgcataatgggcaagattattgtcgagttgggtgaccatctgcggcgtcgcgcccttctgcggaccgaataccgccgaggctccggtcggccccaccaacgggttggtcacatcggaggcgatcaggatgcgcgtgtgcgcgatacgtggatcgacgcccgacacatccacggtgacaagccggtcaaggaatccgccaccacgaggaatgggatcgccatgcgcgtccagaaaacgcactcccagagcttcggccatgccggctccgccatcattggtcgccgacccacccacgccgaggataatcgtgcgggccccgtcatccagagcatgcatcataagttggccggttccgtatgtggtggtgacaagcgggttccgggtgctttcggtaacgaactggatgccgctggcagccgccatctcgatcaccgcggttttgtcctcatctcccgtgttgccaaggatgccatattccaccgtcgtctcgaactgcaacggattcagcacctttgcgctgcgcatatgaccttgggtggcgtccaccaaggaacgaaccgtgccttcgccgccgtcggccatgggcaccatcacatattcggcgtccgggaacacccgcagcagtcccgcgcgaatggcctcaccggcctgttttgccgtcatgcaccccttgaaggaatccggcgcgatcacgaatttcatagcttctcctttattcattaccatccacgaaccaatactcagaacaccatgtatatcaaggtcgcaacgcaggtcatggtcagaccgaccaatgactcgaacggcacactcttcatgcgttcgccgacggtcatcttcatggcctgtgccgtgacgtggaagtagttgccgtgcggcagatgatcgatgacggttgcgccggcctgcatcgtcacggcggcggccaccggggatacgccaaagccgagaatcgaggatccgaaggagctggagccgagaatcacacccgtggaggtcgaggcggtggcggcagccatcagaatgccggccagaggagcgagcagcgagccggaaacgccccaggccttgataaggccgacaatctgcgtggacaagtcggaattcgtgatcaacccgccaatcgcgccggcgccaatcaggatgagtacgacgtcggtcatgcgtgcgagcccggccttggtgaaagccagcaggttcttcccctgcctcattgcgaacagtccgatcagggcggccaacgggagaatgtacatggcatcgatctggaacatcgacaacacttcgatgtgcagcagactgccgaccggattgatcagcagcagtaccacggcgacgaccggggcaaccagagcgcggccgatcggcggcaaatgggcatcgtcggtgtcgccggtgtccacctcggcagcagtaggtgccgcgccatgcttgcgcaataccgtggccagcaatacggccaccgccagaccacacaatgccggcacgacgctgccgatcatcacctgggaaggctgcacgccgaacccggaagccgcggcgatggtgttcgggttgggagacatgatgttgcccgccttgcctccgccagacaaggccaccaatagcgccagcttggagatgcccaatcgattgccgacctcaatggcaattggcgccacaataagcaccgcaaccgggatgaacacacctaccgcgcagataatcatcgtggcgaacgccagcgaaaagatcgcgaggctttcgccgaatttggaaacgatggttttggcgatgcgattggcggcaccggactccatcatcacaccagccagaatgccggcagccagcacacgcacgatggtgcccataacgctttggccacccgccacaacgacgctcaccgtctgggtcagcgacgctccgccgaccagacatccgacaatggccccgagcaacagcgcatatgtggcgttgagttttttaagaatcagcactatggccaatgcaaggccgagcaacgccgcccaccatgcaatcgaaatgccttctaccatcagaatctcctttgattgtcttaccgtttccgcacagcgtcagggtgatggactcacgacgtctcttcattggaacgtagtatagagaccatcaaaaaaaatctatctatacggtcacgatttatgtaatacacattattcttggaaaacacgagcgtcacaatattccacagaacgaacttccgttttcgccagccatgcaataatgttacacagaacatttcgtgtattgcctagaacagacgaggacgtcatggacatagacccgcgcatagcgcagaccattgttgagaacatcaagggcattatccgctacgatatcaatttctttgatgcgcacggcaaaatgatcgccagcaccgacgcaacgcgcatcggcaccttccacgatgccgcgcgtcttgcggcggagcggaaacggaccgtggcagtggatggcgataatcagttcataggcgcccgcaacggcatcaacgcaccggtcatgttcggcgattcggttgtcgcggtcatcggcatcaccggccagcggcacgaagtcgagccattcggcatcatgatcaccaaaatgacggaaatactgattcgggaaaacgtcgagcagatcacacgtttcgaccaacgcatgatgatgacgaatctcatcaatttactggtatcgcagcacaacgatgaggatctcgtctcctatctgtcttccacgctcgatgtcgacctgtcaataccgcgatgcatcgtgctcggacgttgcaccaatgccgacgccgaccacaccaagcgtaacgctctgctcaatgcgttggataagcgttttccttcaggcagcgagtcgatattcagaacttcggcgcgtggattctgcatattattcgccatcaccgatcaagtcggctcaatgggtcaacttgatgaacaccatatgggagtactgtccgatctgcaaaaagagataagccatgtcttgggacgcccgatcagcattggcataggaagcatggaaacgtcggcgaatcaatattggcgcagctaccgacaggcaaccgcggctgtggaatggctccgtttcacccatggtgcacgagtggaggaatacagcaatatcgggctcggcatgctgctgccggcgatgcagcaatccataagcgaacagttcgtgcagaacatcttcgcgggtctggatgatcaacgaatcgacgccttccagacggcgttcaacgcgtacacccgatacaacggaagcgtgagccgggccgccgatagcctgttcatccacaagaacacattgcagaaccatctcaacgccatcgccgagcaaaccggctacaatccgcgcaagctcgatgaccacaccgtactggaactggcgttccttatccgaaactaccgctcgttcaccggcgaagaccctagctgagcatcgtcgccgcgaatatgaaaagtcccgtcaccgatgggtgacgggacttgacgttccatgaccgaaagtcacggagcaatgtcgttcagaggcggcaatcaggcctcaaccggagcgttgacgtcctcaggcagagcagccttggcggcgtccacgatggtcttgaaggtgtccgagtcggagacggcgagctcggcgagagcgcgacggtccagctcgatgccggcaagacgcaggccctggatgaagcggttgtaggtgatgccctcagcgcggacagcagcgttgatgcgctggatccacagcttgcggaagtcacccttgcgagccttacggtcgcggaagttgtagttaaaggagtgcagcagctgttccttagccttgcggtacaggcgggagcgctggccgcggtagccggaagccctctcgagaacaacgcgacgcttcttgtgggcattcactgcgcgcttgacacgtgccataatctattcctcagctttctaaagtcttgtttgttcctgtaagccctaagctcacttctgcagcagctggtgcagcttcttggcctgaccaccgcgcagcacggcatcggcggacagagcgcgacgcttgcgagcggacttgtgctcgaggttgtggcgcatggcggaaccggcctgcatcaccttgccggagccggtgatacgagcgcgcttggaagcggcggaattagttttcatcttcggcattgctgccctccttgctggtttgcttcttgtcggaagtcttctgagaaatcgcggtcttcgcatcggccgcggcctgagcctgcgactcctgcttggccgccaggcgagccgcctgacgagcctgacgctcggcgcgggactcggcgccacgacggcgctgctcggactgggtatgcaccttcttgcccttcggcgcgagggtcatgatgatgttgcgaccctcctgcttcggcttggactcaacggtgccgaattcctcgacatcgtcggccagacgctgcagcagctccacaccaccgatcgggcgggagatctcacgaccgcgcaacatgatggtgactttgaccttgtcgcctccgttgaggaagcgggtcacatggcccttcttcacgtcgaaatcgtggtcgtcgatcttcaggcggaaacgaatctccttgatttctgcggtgctctggttacgacgagcttcacgagccttgatcttctcgttgtacttgaacttgccgtaatcgatgagcttggcgaccggaggcttcgcgttcggggccacctcgacgagatcgaggtttgcctccttggccaggttcagcgcgacggtggtcgcgatgacgcccacctgctcgcccttcgggccgatcaggcgtacctgcgggacgcgaatctcgtcgttaatgcgtggttcgtcgctgatgatgactccaatcctctgcttcaattccttgggcagggctccttgatgaaatgcaatcaacgctcgatggttcatggcaagccggaacatacgcattcacgcacatgcacgcagacatatcgtcattcctgattgcgctcattcatctggcacaatcgctaggctgtttgccttgaacccgaggccttgaaaagcttccaggtgggggtgccccgctttcttgatttctcaagccaaatggaaagtctaccatatgcccggacattgacgggccgtgtgtcgggttccctactgcacggcgcgcagcaggccgccaataccctcatctttcagaatctgacgatacgggccggcttcctcggcgatgatttgatcaatggcatgcatgcccagcacttcgaccggcgctttgtcgtctgtgagaatggtcgacgatgagtccggttcgctcgtaagtggtctcacgcaggttgagtgccttggaggcctactgcatggagttctcttcggagccggaacccggcttcttggcgaacagttcgcggttcgtggtattcggcacgtcggccgtcagcatgttcccattgccgaattttcttccccgcaggccgcgcaacggctacagtagtcggatatgagtaaggtatgcgtgattttcggagccggagaatactatgccggaactcccgtggtgccggatggcgcgtatgtggtagcggccgatggcggactggatcatacgcgcgagctgggcatcgtccccgatgtggtggtgggcgatttcgactcattggaaggacgcccgtcccgcaccgacgtacgcacgattacgctgccctcgctgaaggatgacccggacatgctctccgccttgaaagtcggctgggcggcgggctgccgcgaattccatgtctatggaggtctgggcggacgcattgaccatacgatttccggcattcagctcatgaccttgctggctgggcacggggcaagcggatatctgtatggcgacggactgatagtcacagcaatcacggatggcaagctctccttccccgcgcacccggtacccgaggacggacgaatggtgtcggcgttctcccactccgatgtttcacttggcgtgaacgaaccaggattgaaatacgaactcaaagacagcacgctgaccaacacgatggtgcaaggcgtcagcaatgagttccgcgacggcatagatgccgccatcagcgtggaacatggtaccttgatcgtcaccttccccatcgaagtggcattgcctcaggtaagccgtttccatgaattcagtggcggcatcggcaagctggacaccgaagtgtccaagctgttggttcgctgaccggacgcgagccccggcttccgtggattcacgccgtcggcccaatacgggaaaccgcatatcggttgccggcgatccacaatgtgagcgctcacaaaaaatacgacgtttttgctcaaaacgcacgctcagacattgccatgtgtacagagtcggcattacagtagcaactgttggtaaacaatggcccggtgtgccagagcgcaccacgggcaccctacaagggagaattacatgacagttaagattggtatcaacggcttcggtcgcattggtcgtctcgccttccgtcgcattttcgagctgcaggctcgcggcggccaggctggtgacatcgaggttgccgccatcaacgatctgaccaccccggctaccctggcttacctgctgaagtacgacagcacccacggcaccttccgtcatgacgacggcaccccggttgacgtcaaagccaccgaggactccatcatcgtcgacggcaaggaatacaaggtctacgccgagaaggacgccaacaacattccgtgggtcaagaacgacggtgtcgagtacgtgctcgagtgcaccggcttctacacctccgccgagaagtcccaggctcacatcaacgctggcgccaagaaggtcctgatctccgccccggccaaggatgacaccaccccgaccgtcgtgttcggcgtgaaccacgacatcctcaaggcttccgacgtgatcgtctccgccggctcctgcaccaccaactccatggccgccatggtcaagctgctggacgagaagttcggcatcaaggccggcttcatgaccaccatccacgcctacaccggcacccagatgctgctcgatggcccgcgtggcaccaagaccggccgcaacctgcgcgccgccgccatcaacaccatcgcccactccaccggcgccgccaaggccatcggcaaggtcgttccgtccgtgaacggcaagctgcagggccacgcccagcgcgtccaggttccggacggctccgtcaccgagctgaccaccgttctgaacaccgaggccaccgccgacgagatcaacgaagccttcaaggccgccttctccgacaccgactactacggctacaacgatgagggcatcgtttcctccgacatcctcggcgacacccacggtggcgtgttcgacccgacccagaccgacgtcaacaccattgacggcgtgaccctggctcgcaccgtgtccttctacgacaacgagtacggcttcacctccaacatgatccgtaccctgctgtacttcgctgagatctccgagtgaaccactgcggtctaggccgctacggttcgtttgagaactaagctgtgagacccccgccttgtgcgggggtctcttcgtagtagaacggtaatcatggcaaagaagaagcacgataaaggcgcaggatccactccggcgaccgtccagctggaaaaagcgggcgtcgaattccacgtctatgaatatgagcattccaacgatcacatggacgatggctacggcgtggaagcgtccaccaagctcggtttcgacgaacaccaggtgttcaagacgcttatggcggacaccggctcggagcgtgtggtgggcgtggtgccggtcagcgggcatatggatttgaaggctctggccgcggcagcgggcgccaagaaggcctcgatggccgaccccaaagtggctatgcgcgaatccggctatgtggtcggcggcatttcgcctttgggccagaagacgcatcataaaaccgtattagacgaaagcgcattgcaattcgaccagattctggtctccggcggcaagcgcggcctgtccgtaggcgtcaatccgcaggacctgctcaaggtgttggacgccgtcgccgcgccaatcggcacgtggtgactttgtcttggctcccctcgcagaggggagccaaggatgactatttcttccggcgcagctcggcaggcagcacgaagtgcatgttttccttgatggtttccaccgatttcatgccggtgaaaccctgattgcgtaaagtatcaatcacaccggaaaccaactcatccggcacggaggcgcccgaggaaatgcccacggattccacgccctcaaaccatgacggatcaagctcgttggcatcatccacgcggtaggccttgcctcgctcgcccaagccctcctgagccacttccatcagacgtacggagttcgaagagttggccgatccgacaatcaccacacaatcggactgctgggccaccaacttcaccgccgcctgacgattcgacgtagcatagcaaatatcagagctcggaggctcctcaatccacggaaaacgagccttcaacgcagcaatggtgccggccgtttcatccacgctcaatgtcgtctgcgaaagcaacaccaacttggtgtcgggtgcaaaatccagcgaatcgacatccgattcatgctcaatcagatgcacatgctcggggctctcccccactacgccaaccgcctcatcgtgccctttatgcccgatgtagacaatctcatacccctcgcgcacaaaacgcaacacttcacgatgcaccttgcctaccagcgggcaagtagcgtccaccacgtgcataccacggcgctgagcctccgacttcaccaccggagatacgccatgagcggaaaacaccaccggaatgccagccgcagcggccgcatccggaatctcgctcaactcttggacgaataccgcaccctggcctgccaaatcctcgaccacatgcttgttatgcacgatttgcctacgcacatacaccggtggcagaccatcctcacggtggagcttcccagacgattccgcagccttaagaatcgtttgcacggtgagaatcgcacgatccacaccagcgcaaaacccgcgcgggtcggcgagcaccacacttttggtcatcggaacctcctgaatgtcaacactgttctccagtgtaaagcagggactacaggaggttactgccaacctcctgtgccagagcccgtgctccgccatcttttcaaagaatccccgcgtttttcgcgtacgatgtgacactcgccacgttcaccacccgcaatgctctttcctgatacacgtgccgactccatagccgccgccaatcccgcttcgacagcggaaacgcgctagactgaggccagcgatagcaggagctaccgaaccatccatcctcactacgggagtgattccatgacgagcaaaacgccacgcaccggcaaccagtattcgattcaccacggcgactactccgctgtgatttgcgagctaggcgcgaaaatccgccggttcgacttcaacggcaaggaaatcttctgtccattcggggtcaacgatctgaccccgacctgcaacggatacgtgctggccccttggccaaaccgtattgaaaacggtgaatacgatttcaatggcaagcactactgcgctccggtcaacgaatatcacccggctccgcgcaacaacgcgaaccatggatacgcctaccactacatgtggaagctcgaatcgctcaccgacagcgccgtgacgctttcactgcgcttccccaacctggacggatacccgttcgatgtgaccgtgaccgtgacctacgaattgggcgaaaatggcatgaccgtgaccatcaatgcccgcaatgatggcgacgagccggcaccttgggctcttggcctgcacccgtggcttgccaacggcgagcagggcgcgacttccgccgaacgcgatgccgactccgccgcctgccatctgcagatcagggccgccagtcatgtgacggtgaacgaggcgctgattcccaccggcactgaacctgttgccggcatctacgatctgaacgatggtccgacgctcgaaggccgcgctttcgatgacgcctgggttgatgtggagcgcgccgccgatggcacgaccactaccacgttcacccgtcctgatggtatcgaagtgaagctgatcggcgacgaaaccatcaatgcctggcagtgctacaccgccacgggagctccatttgccgagcatccgtacggcatcgccgtcgaaccgatgaccgccccggccaacgccttccgcaccggcaactatctggtgacactcgcacccgatagtgattacaccactgtggtgcgttatgaagtagcccagaagtaatccagaaatagccctatgaattggctctcctcattgaggagagccaattttgttatctatatacgccgcgtcccaacgctgatgcggtacgattgcgagcggcaacaatacgctttcacaaaggagtgtgcactatggctttgaagcctcgcaccggtaaccaatacgccatctcatccggcgaatggagtgccgttgtcactgagctgggcgccagcttgcgcgaactgaagtggcgcggcgaagacatcatcgtccccttcgacccggacaaggtgattccctgctgcaacggatgtgtgctggcaccgtacccgaaccgcgtgaccaacggtcagtactccttcgacggtgaagactatcagatgccgatcgacgaatttgaccgtcaatcctccctgcacggctatgcctaccgttatatgtgggagcttgaggacctgcaggaatcgcatgtgacgctctcatggcgctcccccgacatcgccggatatccgttcgacatcaccatcaccgccacctacgcgttggacgagaacggccttacggagaccttcaccgtgcacaacaacgacgccgtgaaggcaccgtgggcgttcggcattcacccgtggcttgccaacggcaagcatgccactggcccggccatcaccgccgacaacgagccatgccgcctcgagctgcattgcgacactcacgtgactgttgacgagcatctgctgcccactggcgaagagccggtctccggcatcttcgatctgcgcagcaaccccacccttgaggggcgcggcttcgatgacgcctggaccgacatcaccaaccgcagtgctgacggcagcacctctgccgtattcacccgccccgatggcatcaaggtcactctgaccggcgacaagaccatcaattcctggcaggtctgcaccggcaacgagattggcgagaaagtccgtcagcccggtgtggccgtcgaaccgatgactgcctacgccgatgcattccgtaccggcaaggatctggtcgtgctcgaaccaggcgctgattacaccactgtggtcacgttccaggccgagcagctctgaaccaatcagccgaatgtgcgccatatgggcgcgcggtttgagaacgtcgcgctcatgtggcataattccgaaggcttaattttttactgcagcaaaggagtccatcatgggcatgcgcggacgtaagcgcaaggatcgtcgtaagaaggccgccaaccacggcaagcgtccaaacgcctgattcttcgcgtttgatataaacgcaaaaggcccgtctgagcaatcagacgggccttttcatatatatctctcacatcatttgtcctcgccgcagcaatggtcgagcgtggctttcagacgggccatgaggcattcaggagccacatccggccgcaagtaggcgcgcatcgcggcaatcagagcctgttcgcgcgcatcgcaacacgtgctggggtcaaaacagtcaccctcggccacgatatgcacgtcagccgatgccgttccagtctcatcatcacgatgatgtactgcagtaatgtgcacttccgtctggctgaccgtgccatcggacgaagtacgggttatggagatgtgacgggtatgctctgtcggctggtcgttcatcgcatctcatttccctgaggcttacgagactgtcgaagcatgcgagcgcgtgctaccgtatccgtgatggtttgcgcggcgtcatcgctgtcaacagtatgttcactagttccattatggacatgttccacggtttgaccaacgttttcgcccaacttcgctgatggtgaatcggtaatgtatccgcgatccttggcatatgaggcaagttcccgtttcagttgagtacgtgcacggttcaaccggctcatcaccgtgcctattttcaccccttgctcgtcagccacctgctgataggacttgccgtcgatggcggcatcgatgaacacttgccgacgttctggagacaatttggcgagcgcagccataatctcttccggagcaaaggcatccagatattcctgttcggcagatttcaacccatctgaagtatgttcagaagcatcgtagatgtcccagtcatcatattcgccggtcgaatcgttggcgcgttgcggacgtcgtttggccttggcgtactggttgaaatacgcgtttcgttcgatggtcgtcatccatgcctcgaagttcgatccaggctggaaggaatcaaacgccttgaacccgcgctcgaacgtatcctgcaccagatcctgcgcatcgtcggggttgttggtcagcctcatggcctgacgatagagcgtgttgacggcgggcatggcgagctgctcgaaacgagcgcgcttagccgccatggattccccggcttcggccggcatcccggtatgcactgttgcttcgcttgtcgtcacaattctccattctagccaaatcttgtgcccatatcgtggctgatgacatgtgagccacgccacggcatgaccgccctgtagaatggctaatcggctaggaatagggagaaaagatttatggctttgactttggctgcggccgccgaattgctcgaccgacatcatctgctccgcgaaatcatccaaggcgattgctggaccgacaacgcagcggatctcgccggcgccgacgagccgttcaccgccatcacctatgacacccgcaaagtcactcccggcacactgctatgctgcaagggccggttcaaggcggattacttgacggacatcgatcaggccggacttgccgcatacatggccgaaaccgagtattccgccgtcacccgcgcccctggactgatcgtcaatgatgcgcgtaaggccatgagcctgctgtccgctgagttctatggccgcccgcaggatgagctgaccgtcatcggtatcaccggcaccaagggcaagaccaccaccgcatattttgttcaagctgtgctcaacgctttttccgacggtaagaccgcgctgttctcgtcggtcgataattgcctggatggtcgcacctatgtggaatcggacctaaccactcccgagtcgatggatgccttccgtatgatgcgcgaggcggtcgacaatggcatgcggtatctggtgatggaagtctcctcccaggcatacaaagtggagcgcgtatatggtctgacctttgatgccggcgcgttcctcaatatctcccccgatcacatcagcccgatcgaacaccccacattcgaggattatctgtattgcaagcggcagatcacacacaattgccgcacactggtgctcggcgccgactgcgatcatgccgatttgattcggcaggatgctcaagcctcgaatgtaccggtcaccacttttgcgctgcatgctgcggacgggcacggcacgcatgccgatttcgtcgcgctgccggatgcatcctcaggctacctgttccaggagcagggcaaggctattggcgatttttcgctggaactggaaggcgagttcaatgccgccaacgccgctgccgccattgccttgtcacgtgcagtcggcgtaccagctggctcagaggctttccgcgctctggaacgtgtgcatattcccgggcgtatggaacattatgaatccggcaatatggtggcgtacgtagattatgcgcacaactatgtgagcacgaagaccctggccgagttcgtgacacataaatacgcggatcgcaatccgcgtgtcgtcgtggtcactggctccgtgggagataaagccgtggaccgccgtgaaggcatcatcaagggtgcgcaggattatgcggatcgcattattctgactgcggaagacacagtgcacgagcgcatgatcgatattcttcatgagatgcagggttatatcaccaatcctcgagtcgtctcggatatcgagctcgatcgtgcgaaggccatcgaaaaagcagtcgaggatgcgcacgcccatgcggacaggctgaccattctgctggtcatcggcaagggtgaagaacgttggatcaaggtcgatggcaagcacgcgccttacgagggcgatgaccatgtggtcaagcgcctgttcggactgttgaacgactgatcagccagccatctgaacccgcaatcggaataagaaaagcaagaggataaggagcaatcattgattacgctggaacacgtcacgttgccggccatggaacaggccgcggcagaggcaggcatcgtactgccgattgagcagacggaagcctggggccgctatcaggccaaggtgccgggacgccacccgtggggcgcgtaccttatccgccgcgatggtgagttggtggcggtcatctccctgatcgattacgagacccacggctaccactatctgcgttcgctgcatggtccggtgtggaagaccaagccctcccaggaggaggagcacgaggtaatggacgcactggtcaaggccgtgcgctcccacgaccgcaaggtggcgttcctgcgcgtggatacatggttcgatgaaggctactaccgtgtgctgtccacggtaccgtatgaccagaccgtgatcgttgacctgaccggcggcgacgacaagattcttgagcgtatggtggcgcgtggccgccaaaacgtgcgcaaggccctgcgcgaaagcccggccacctgcgccgacgaaaccgagcaggcttccaaatcgttcgacgagtattacggcgtgatggtcgacaccggcaagcgcgacggctttgccccggctccgaagcaggactatgaggatatgattcaggagctcggtcctgagcactgccgactgtttgtcagccgtatcgacggcaaggtggtcaactggtgcctgattaccttgaacgacaatcgcgccgtctactactacggttgcatgagcaccgccgtacgccgtctgcgcgtgccggacaagatgttctatcacatcttctgcacactgggcgcgcagggcgtggaaagccttgacatgatgggcatcggctctgacttcgcaccgtccttgaagggactgaaccagttcaagaccaagttcgcccgggagattactccggtggcggcaggccatgacattccggtcaagcgcggtttctacagcctgctgcgcttcattcagaaactgcgtaagggctcaaacgcggacaagcactaagctcgcttccccctgatgacgagctatcgtcatccagaaaacattcagcacagctccagcttctggtgggcagattctaatcgttctgccacgtgagcgtcgcacaataaccaatgattatcaatacatcgacgcatagaggctggagttatgcttgctgtcgccagaacgacatttcgtgatattgaaaaagaagccgctggttgcgatatcacgctgcccattgaagactatctcgacatgattggcgcattgggcgcgagacactgccgcgtattcgccacgcgcatcgatggacaagtggtggcctggtccatcgttacggtggaaggctcgtatgcggtgcactattatgccgccatgcgcgacactgccatgcgtattcatgtgaccgatcgactgctgtatgccgaatgctgcatgctgggctcgcagggtatcaccgattacgatttgatgggtatcggctctgacttcgcgccatcgctcaagggtctgaacgcattcaagaccaagttcaccgagacgatcacaccggtgaccccggcccgtgacgtgccgctcaagaaggtcttctacaagacattgcaggccgtgcaaggtgtgcgccgagcgttccgccaataaacccgggagtggcttatttgtccagcttctggctcactacagcggtgacgccatcggctcgcatcgtcacgccgtacagcgcatcagcgattgacatcgtgcgctgctgatgcgtgatgatgatgagctgggcatgagcacgcaactcgttgaacgcgtcgatgagacgggtcaggttcacgtcgtccagcgcggcctcgacctcatccatcacatagaacgggcttgggcgcgcggtgaaaatcgcgaacaacagagccaatgcggtcagcgagcgctcgccaccggagagcaggctcagctgtttgacgcgcttgcctgccgggctggcctcgaccagcacgcccgtggtgagcagatcctctggattctccagacgcaaccgtcctgtgccacccgggaatagtgtggcgaacatcttctcaaaagcttcggcggtatcgtcaaatgcggacttgaacacctcgaccatagtggagtcaagatccttgatgagctgcatgagatcatcacgagacttgaccacatcgttgcgctggtcgttgaggtacttgttgcgttcttccagcgcctcgaactcctcggtggccagcggattgatcttgccaagcgcagccaagtcgcgacgggccttgtcgagtcgcttctgctgttcctggcggttgtatggcacggtttggaagcggctggggtccgtaacgctgttcgctgcggcgtcgggggcatcgattgccgcatcatcggcattgccgtcgccctcgccatccatatgctccagtggcacaggattgccatcatcgtcaagtaccgggaccggctgatcggggccatactcacgtaccagttcctccagggtgagaccgagctcatcggacactttctgcatgagctgaccggcttcggcggccagacgctcacgattcacgtccaaggcgtgttcgcggcctgtcagatcggtgaccttcggctcaatctcattgcgctgggcgcgcagggttttgagctcatcgtcatgactggacgccgcctcctgtagcttgtcccgctcagcggcgacgccctgcagcgtgcgttccaccatggcggccacctcgcgtgcatcatcagccacatcttgcagatgggcggcctgatcacgccgacgctcgttcaacgattcgatacgggcgcgacgttcaacggcttccttggcattatcgcgcaacagcccggtctgtcgggtcagggactcccccttgcgactggcttcagtccatgcaatcttcgcggcgacctcatgctcacgggtcaggttcaagtcacgttccagtgtgcgctcgcgttcgtcaagctcatcgaaatcggcatgctcgtcagtggattgctgcgccgattccaaagagcggttgagatcatcgagcttcagctgatgttcgttacgattctcttgagtgtcagcagttttcttgtccaactgttcaagctgacgcgcgaacgacgcaaccctatcctcggcggatttcagcgacttttccgcttgctgagccttgagtcggacttccgtgcgcttggcggattcctgatcgaccagacgggcggcctcgtcacgcttggatttggcctcgctcacctgctcagccaattcattggcctcgacaccaagctgcttgacttgggccagcgccttgtccctgcgggcggcaagcgacaggtcggactgggaaatcgatgatccgccgactgcggccacaccgtgggcaaaggtctcgccatgcttggtgacggcgcgtggggcctttccggaagcgacgagacgctgcgcttcatcagccgtctcggctgcggccacatcggccagcagcagccgcacggtgcgcacgcaggccgcggcctgcgtcttatccgaggcctcgggattagccgtcacaaggttcgccaagcatatatcggtatcggcaagagcagcgaatggttcatcggccggcattgcggtcagcaccacggctttgccgagcttgtcttcacgggcacgctcgagggcatgaagcatattgccggtttccggcaccacgatggcactggcatattggtcaagcgcatgggccacggcttcttcccaaccatcagccacatggataaagtcggtgagacgcccgagggatgccacctgctcgtcccgttccagcgatccggaggcgttgcggctgtccaacgtgtcggacagtgcatcggctttggcctgcaacgagatgatcttggactgtacgtcacgctgacgatcggtcagctcattcaacacatcgcgacgctctgccagggcggcacgggccttgtccaatgcggcaccgtcatcatcggccacggattgcgcctcactgcgcagcgattccaactgatgctgcgcatcatcatgctgcttggcgagcgtctcccgctgcccggtatgatccttggcgcggctgtccgccagttgtacggcggattcctctcgggctatcaattcacgcagactggcgatatgagcgtcacgctcttgcgcggttttacggagctcggtcaaggtctgacggatggaagcgagcttcttttcatcgtcggcgcgctcttcggtggccttatcaagtgcgatgcgggcgtccgccacggctttggtctgcgctgcagcctgagtctccagctcttcggccctcttgagcagcatgtccgggtcttctccgaaattgctgacgatctggccggtgagcgaatgtccgcgttcctcggccaactgggcaagcgcatgcaaacgctcccggatctgggaaaattcatgccaatactgattggtcttggcaatggccgggctggattcggaactcaacgcctcgacttgttcgatgcgcaccttgacctgggcaagctcgcgttgggcaacggacagctgactgcgcacatcgccgagttccttgcgcaccgtctcgcggcgagccatcgaacgctgggcatcctcggcatagatgcgagcctgggcgtcacgtacggaaacctgaatggcatcggcccggcgagaaatgcgcgcctgacggcccaacgggccaagctgcctgtgaatctctcgcagtaagtcatcgagtcggttgagatttgattccgtattagccagcttgcgcagggcgcgttccttgcgcttgcgatgcttgaggattcccgccgcctcctcgataaacgcacggtggccggacgggtcggccttaagaatcgcatccagacggccctgccccacgatgacgtgcatctgctggcccaagccagtatccgaaagcaattcctgaatatccagcagtcggcattgggaaccgttgatggcgtattcggatccgccattgcggaagatggtacgggaaatggtgacttcggtgtaatcgatgtcaagcgtgtgatcggaattgtcgatggtcaggctcacctgcgcgcggcccaacggcgggcgggaggaggtgccggcaaaaatcacgtcctccatcgacgtgcctctcaggttcttggctccctgctcacccataacccaggtcagggcatcgacgatattcgatttgcccgaaccattgggtcccacgaccgccgtgatgccaggctcaaaacgcagcgcggtggcggaggcaaaggacttgaatccgcggagggtgagttccttgagatacataacttgaacgtttttcgttgatgggtgttacggactactgtatgtcaggcgtccgagcccgcactggagtcctggtcagatgaaccgtcggcattgttgttcttcgccgcatcgccgaggccgagcacgtcaaatacgtcgaaatcatcggggctgacgttatcctcgagcgtatcggcgccggactgatccccgtgaccatctgtggcatcatcgagatcgaccgccggctgatggatggccatagcctgctgcatcgtggggctggcatgctcggcaagcatggtacgtgcatcaccggcagtcacgaagctgccgcaaacgagtacgccatggccatagccgacacccagctcatcttccgcatcgaccatattgacggcggtctggatggcatcaggcagattcggctccttgatgactcgatcacggccgaacacctcaacggcgatcttctccagctcatcggccggcatcacgcgctcgcgccatgaattctcagtgactaccacggagctgagaatcggctccaacacaccaagatactcttcgacctgcttgtctcgcatcatggcgactacaccaaccagttgcttgaagtcgtagctttcctcgatggccttacgcagggcttcggcggcgttgacgttatggccgccgtccaaaatgatggtcggcgaggtacgaatctgctcgatgcggcccggaatcttcaccgagcccaatgcttcggccaccagatcgccgtccaatgggccgttgaccggaatcaccacttcggcggcggcgagcgcggcgagcgcgttatgcgcctgatgttcgccgaacttggcaatcggcacgccctcatacgtgccattgggcgtggtcagcgtggcgacctgacctccgaccgcggccatgcgatcggacacggtcatctcgtaaccatcacgcaccaacgtggcatggttgcgttcggcggcctcttcaagaatcggcataaccgcttcctcatgcggctgcgcaccgatgatggcggcgcaattcggcttgatgatgccggccttctcgcctgcgatctgctcgacggtgtcccccagccattgcatgtgatccatgtcgacagggccgatgaccgcggcatccgcgttcaacacattggtggcgtcccacaggccgcccatgcccacctcgacgacggccacatccacgggagcgtcggcgaatttccagatggccatggcggtgagcacttcgaagaagctcatcttcggcttgccctgttcctccattttggcgtccaccaaggccacgaggtccttggtctggtcccatacgtcgatgaaatcgtcatcggaaagctgctggccgtcgatagcgatacgctcgttgaccttctccaagtgcggtgaggtgtacaggccggtacgcatgccgtacgcacggcagatggcttcggccatgcgcgcggtggagcccttgccgttggtgccggtcacatgaatcacacggaacgactgctccgggtggcccaaaatatcgagcatcagattcatccggtcaagatccagattggtggtgttgtgctccggcggacggctcatgatatccagttcgacgtcccgcatgctctcgttgttccgattcggatgctcgaatgacatgtactcttctgacctctgcgctcaattgatgctcatattgatccgtacgttcccattatgcgttcgtacgaatttatgcgtgtccgtatgagctcgtatgtgtccacacgagttcgtacatatccgcatgtgttgctttgtgtaactcggttgcgcgcgacctttcttcatgccttcgcatgcgcaaaaccgcactctcccaagctcctccatcttagccgccggggtagtttatcgtgcgcgctcagtgaaaccgcctcgcatattgtgtctggaaaactgaaatagtccgttcccatacaccgacgtcacagaacgaaatcccctgcacatcaagttgctcaaagccggaatcccgaaatcagatgtcagcggataaccaggatatgcgagaacgagacgattgcaatggacagctgcgaccactatgcaacccatgcccataagtgcgtccacattccgtgccgagtttcgtctttatcctgcaatcacgccaggaatgcatatggccgactagtatgaggttggaaatcgatgattcgataacaactacatacaggagagtggcaatgggtgaagtgatcaccgccaaggacaaggaatatgaggccgaagagcgcaagagcgcgcccggcgacaaccagtcgatgagtgaccgcgtgaacaatcgatcgctgcgtccgcaatcgcccgcattcaaggatttcatgaagtccggctgggccgacgacgacccggaaatcaagccgctcgaatcctccaagtacattcccgcccgccttgaggcgctaggcaaggcattccccggcgagcgtctggtcattccggccggccagccgaaggtacgcaacaatgattgcgattacgccttccgcccggataccaccttcgcctattacacgggcctgggctccgactacgaagccggtgccgtgctggtgctgaacccggtcgaccctgactcccccgaagccggagccggtaagacccatacgccggaactgttcgtggctccgcgcgcagataactccaccgaggacttcttcatgtccgcacactatggcgagtactgggtgggaccgcgcgcaggcctcaaggaaatgcagtcgatgaccggcatcgaaacccatgacatcgcccagctggccgactcgctcggcaaggatgtcggagccgaggccggagccgttcgtgtacgcgtggtcagcgaaaccgacccgcaggtcacctcgatggtcgaatccattcgtgaggcaaacggcttcgccgacccggacaagaattctgccgccgatgacaagctgcacgagttcgccgccgaggcccgtatggtcaaggacggctacgagatcaacgagatgcgcaaggccgtggatgccaccaagcatggctttgatcgtctgctctcctccttgccgtccgcgctcgacaagccgcgttccgagcgcatcctcgaaggtgcgttcaacgccgtctcccgcgaactgggcaacgccgtcggctacgactccatcgtggcttccggcccccacgccccgatcctgcactggatgcgcaacaccggcgtggtgaagaacggcgatatgctgctcgtggacgccggcgtcgaggtcgattccctgtacacggccgacatcacccgtaccttcccgaccaatggcaagttcaccgacttccagaagcgcctgtatcaggcagtgctggactcgcaacaggccggcttcgaggctgccaagccgggtgccacctactctgacatccatcacgcctgcatgcgcgtgatcgccgagcgtctgcacgactggggtctgctgccggtgagcgttgaggagtcgctctccccgcaaggacagcagcaccgtcgttggctcgcctgtggtgtggctcaccatctgggtcttgatgtgcatgactgcgcacaggctcgattcgagtcctatcagggagccccgattcgcccgggcatgattttcaccatcgagcccggtctgtacttccgcgaggatgatttgctgattccgccggaatatcgcggcatcggcatccgcatcgaggatgacgtgctcatgaccgagaacggccccgaatggatttccgccggcatcccgaagcaaatcgatgatgtcgagcagtggatggccgatcaggccgcacaggcgaagtaatcaaaccagctccctctttgaggggagctgtcaccgtaggtgactgaggagggtcagctcacgtaaactcccctcagtctgcttcgcagacagctcccttcggagagggagccaattattgtgaaaagggaggcaacatgcctactccagaattcgtgttggaacttcgcaagaaaatcggccatgatctgctttggctgattggtgtgaccggctgcgtgctcaacgaccagggccaactattgctcggccgccgttccgacaccggcgaatgggcgatgatctacggcatcaatgagccgggtgagcagccggctgacaccgtggttcgtgaaatcaaagaagagaccggggtcgatgccatcgtcaccgatctggtggccgtcacttcgtccaacaaggtaatcacatacgccaatggcgacaacaccatgtacatggatcattcgttcctgtgcgcgttgaaaccgggaggcaatgccgaaccgtttgttggcgatgaggaaagcctcaacgtgggctggttcgacctgaatgacctgccctctcccctggcggcaagcaccacggaacgactcagcctgttccaccagtatttggagaacaaaaagcatggtgacgctcatgccctcttccaatttgacgggcaacagcactagcaagagctcgctatagcatgaatgtggggagctccggtatcacaccggaagctccccacattgttaatcggtcaggaacgaagccttgccattgcagctatttcaacttgcgccccgcacaccaaacctgttcgaccgtccagtcggcgggattgataagattgaagtcggcggcaaaaccgggcgcaatcaggccgattggagcaccagtcacctcatttggccgattgaagccaaaggcctttgccggtgtcaacgtcgcagcctcgaccgcatcgacagcactgatgccgagctcgttaaccgcacgacgcacagccacctccagcaataatgtggagccggcaatggcgccgttggacaccagacgagcatgaccatcgaccacattcacgtccagcgcaccgagtttgtatgcgccatccgggcaatcggtggcggccatggcgtcagtgacaaaggcggtacgatgcggcgcgaaacggaacgaaagcttcaccatgggattctgcacgtggaaaccatcgttgatcagctcgatggtcacgcgaggatcctccactgcggccggaatcgggcccggctcacgatggtgcaggccgttcatcgcgttgaacatgtgtgtcatgatgccggcccctgcatcaaaaccggccttggcggtctcgtagtcggcatcacaatgccccaccgcaggcaccacgccggcggcgcggaactggcggatggcggaaatgccatgcggcaattcaggggcaatggttatctgccggatgcagcccagcttgccattgacagcacctgaggcctccagcatctcatccacgatttcaggaactggatccttgaggcattccgggtcatgagcacccttgcgggccaaggccaggaaaggcccctccagatggcatcccaaaatatcggggcgtccggcttccattttggcgcgcacattgcggatattgccgcagatgacgtccacgggattggtaatcagcgacagcacctgacgagtcgtgccatgcacggcatgcccggcacgagccacatcaatgccatccgggccgtcatcgaagctcttctcccatgcgccgtgcgagtgaatgtccacatagccaggagtcaggattcgcccttcggcatccaccactgcattacggtcagcagggtcgatgcccaccgtgccgcaatactgttcgaaagcctcatcgcccacaccggatgccacgatggcaccggatgcgttggacacgacccaatacccactctgttcgccgcgcgcatccaccttgcgggcattgcgaatggccaccggagccggtgcgccttccaatgccgccgtcacacgggagacaatttcttccctatcagacatatgcaattcctccacgtggttgccccccccttgagaggggagccaaccaataactcagatgccctgccaggccggcttgtgggtgtatgcgtagcggtagtagtccttgtgacgcaggcggctcgcagcctcctcgtccacgataatcgtggcgtgcggatgcatctgcagcgcggaggccgggcagaatgcggagacgccgccttcgacggtctcctcgatggcctcggccttgccggcgccgaaggcaagtagcaccagatggcgggccttcataattgtgccgatgccctgcgtaatgcagtgggtcggcacctggttgatgtcgttgtcaaagaagcgcgcgttatccacacgggtctgctccgccagagtcttgacgcgagtaccggaagccagcgaagagcccggctcattgaagcccacatggccgtccgtgccaatacccagaatctgcacgtcgatgccgccagcggcctcgatggcgcgatcgtaggcagggccggcaagcgccaccttgtcgccatcctcaagcggcgtgccattgagcacgtcaccgggcacgtggaccttggacggatccaggccaagaggctccaccacggtacggtggatggtggcatggtaggactcgggatgggtcagcggcagcccgatatattcatcgagcgcgtagccactcacctgggagatgtcgatcgactcgtcatgtacgatcttggcaagcgcctgataggctgccagcgggctggagccagtggccaggcccagcactgcgttcggcttggctttgatgagatcggccacgcaacggccataaatctcgcctgcttcggcttcgttcttgacaatgatgatttccggcataggtatcttcctccgttcatgaggcccgctagacacgggcttctgcccaaagccgcccatcatggttcatggcaacttctttgtcactttccacaatgtgcagtccgattatgtcgatgttcgcatcaacctaaccagttatttgttaatactacttacaattatggacgtacggacactcggcgttcccaaaccagaacaatcgagtacactggaatgtattagtgaagttccctaacagattcaacaccgaacggaatctcacataccgtgtggttatatagacatacagccgccacggcacatgcgcagtcatcgttcaggcaggaggaatgtatgtcgtatcctggtcttgccaccgcgacggatgaccgtaccgtcaaagcctcccccgccgatgtacgccgcaaaaaccgtcagctcattttcgccctgctgtttccgaccaaacagtattcacgcgccgaacttggccgccgcaccggactgagccgcgtggccgtgtctgacgtggtcggccagatgctcgaagaaggcctattgcgcgaaaccggccaggcgcccagcggcggcaagggcaaacgaggcacgctgctgagcatagacaccaaccggctgcgcataatcagcattgatttgacgcaggagcatctgcttcacggcacggtcaccaatctgttgggacaaccgctgcgccacgccgaagtcaccttgaatgccggagcatatgtttccgtggacatcatcatcgaactcatcgagaagatgctcggcatgtccgacggcgaggtcatcggcatcggcgtgtcctcccccggtgtggtcgatggcggcgtagtgcgatcctccacgatgcgcggatggcgcaatctcgatttggccacacccatcaacgagcatttcggcatcgacaccaccgtcagcaatgacgccactagtgccatgctcaccgaacgcttcttcggccagggcgggccgaatatgctgttcgtgcggatggacagcggcctcggttcggcgattctgctgagcgacaccccagtcatcggcgaactgcatgcggcgggcgaaatcggccacatctccatcgacttgaatggtccactatgcccatgcggcaaacgtggatgcctggagaccatgatttccgccgatgcgctgagaaaacagatggccaacgtcgacgatgacgagcggcaggcaatactcgcccgcgccggacggtacctcggccaggccttggccatgcccgcgggcctgttggatatgtccgacgtctgcatattcgggcaaccggacatcatcaacacgaccttcatcgacgccgcccaggcctatctcgacgccagcacgtcatcgtccttccacaagcacaccgtgatcaggcgctgcgaatgcgggccggatatcaccgtgcagggagaagccatcgccgtgctgctccagtatctggccaaatagtcagatagccagcaccgggtggcagcactacgcggccatagccgctccgatggcccccaccggctgccccgccggggccagacgaagccgagccggcaaatccagcgactccaaaaagcggcactgtgattctcgacgacgcagctcagcggtaattacctcaaccaacggttcgccggttttggccataccgccacccaacacgatcaatcggggatcgaccgactgagccagaatctggatggtgtcgccaatggccctcaccaccatatccagcacatccacggccttcgcctcacgtctgctggcgcagcgaatcaagtcgggcatcggcggatcggcgttcggccacaacctgcccaccgcagcccccgagcacacggtttccagacacccatactggccgcaggggcacttcaaacgatgcggctcaaccggaatatgaccgatttcgcctgcggccccactgtatccatgcagcagcaccccgttctgcacgatgcccgcagccagtccggtaccgaaattcaggaacgcgatggtgccgtccaagccatccgcacctcccaacagcactgcagcacccactgcggcagcgttgacatcgttttccacatgcaccggcacgcctgccagtctggagacttcggggcccatatccaacgaaaccacatcaagattcacgatgttgcccacgtgtccggtggcggagtcgaccgtgcccggtgtgccgatgccgattgccgagacctcgtcaaagcgggttcccgcggcctgccgcgcgaccgatacaatgtcctcgaccaccgcagcgttaccatgacgtgcagggattctggcggagttcagcaccgcgcccgttgcatcgacaagcgccgcctcgatcttggtgccacccacatcaacaccaatcctgaaattgttcacggtgttatcagtcattgcctatcccccgttcttcgtcgaacaatatgcttggaatcagtatgcatttatgtattgacaactatcttaacaaattacagaaaaccatgcgcctcatacgcgacacgccgagacataagttgattgcgcgaatagattaactacgttaatatcttaatcaagttcagattcaaagacgagcggacgttacccaggcaacgacgcgggacaaaggagaatgatatggcagacgatactgcacgcgccacttctcaggccagcgtttccgaatccaaccgctcccgcatcgtcaagcatctctaccacaacggcatcagctcccgcgcacaaatcgccaaggccttggaactcacgccggccgccatcaccaagatcaccgcacggcttatcgaagccggcatgattgaagagaccggcgacctggaaggctccaagaaccgccgttccatcgggctgaaaattgacaccgctcgcttccgcgtcatcggtgtcaagttcgcccgtcccctcgtgcaaatcggcgtgttcgacctgtgcggcaatgcgctcagcaccgaaaacctgcccccggtgtacgaccacaccatcagcgacaccatcacggccatccaccaacgcatcagcgatctgcttgatgacgatccgtccatcgtggccatcggcatggccgttcccggcccttacctgcgcaacgtcggccgcaccgctgtggtctccagcatgcaaagctggcgcaaaatcaacttcatcaacgaattttccaccgcgttccgagtgcccgtcttcatcgagcaggatgcccgcgccggcgcgctggcccactacctgttcgaccccgcattccacaccaacgattacctcgcctactatctggtcggcgaaggcgtgggacttggcgtcatcgacaatggccacctcgtcaacggcgcgcaaggcgcagccaccgaaatcggccatatctccgttgatgtcaacggcaagccctgcgattgcggcaacgtcggctgcctggaacgttactgctccgccccggtcatccatgacatgcttatcgaggacggctcggttatcccggacgcctcagacatgacccatgccgaagccgcccgagccttgttcgccaaagccaacgaaggcaacgccgcggcccagtccatggttcgcgaagtggcgcggtatatcggctacggctgcatcaccatcttcaacgctttcaatcccgaacacatcatcatcggcgacatcgtatccgaggcgggccatctgctgctggacacggttcgcgccacggtggccgaacgagccatccccgaaatcaacgatttcacctccataacactctccaccctaccgattgactccaccgtctgcggagctgcggctgtggcggtcacccagtttttggaacacccctcggtgttcttcgacgtttcctgaccgaagcgccgaccagagatttccatacgaaatcagtaatcagagaaaccataaggaaaggaaccaaccatgactaccccgatcgttctgagccttggcgaactgctgtgggatatgctgccgggcggcaagcgagccggcggcgcccctgtcaacttcgcctaccacgcgatgaagaacggcaccgaaggctgggctatcagcgcggtcggtgaggatgagctcggcgacgagctgatcgccaaggccgacgaagccggcatcaacaccgttatccagcgcaacgcttggccgacttccaccgtcgaggtcgccctgaagaacggtatcccggagtacaccatcgtcaagggcgtggcctgggatcacattctgtacacccgccagctcatcaatgttgtttccaaggccgacgccgtctgcttcggcaccctggccctgcgctcccccgaatcgcatgccaccatcaccgagctgctcaagcacaccaagccgggcgcgatgaagttcttcgacatcaacctgcgcggcgaccactactccaaggaactcatcgaggagctgctcaaggccgccaccgtattcaagatcaacgacgaagagctcctgctgctgcgcgacatgttcgatattcgcggcacctccggcgaggatgcctcccgctggttcctggacgagttcgacctcgattacgtgattctgaccgccggctccgcctactccaccatcatgtcccgcaagggcgaggtttccacgctggacaccccgcatgtcgaggtggttgacaccgtgggtgccggcgactccttctccggcacgttcaccgctcgcactctgctcggcgactcgctggccgacgctcaccgcaaggccgtcaacaccgccgccttcgtgtgcactcaggccggcgcttggccggagtatccggctgagatgcctgactacctcgttgccgcaggcaagtaagccttcggcaacaccgaccaataggccatacttttccagccgtttttcggctcatgctcacgctgggacaatgacgttccggcactcgccagcccctgtctcccggcgtgagccatgcccaaaaacaggtgattgataactgaatatcgattagcaattcattgtctcattgcagtaaagaaaaagggaattcaaaatgagcaacgaaaccaccaagaccggcaacgccggcctcgtaaaatcgcgcctgtgatgttcgcgttcttcgtcatgggcttcgtcgatctggtcggcaccgccacgaactacgtcaaggctgagttcgatctggccaacggcaccgcaaacctgttcaccaccatggtgttcttctggttcctgatcttcgccatgcccaccggcatgttgatgaacaaaatcggccgctgtttcaagcttctgttctccgaccacatcgtgttcctgtacttcctcggcatcgtagcccacgtgggcgtggacgtcggcatcaacgcccaggccccgcgcatcctcaccgaacacaccggcgacaccttcaccgaaatcgccgccaccgctaccatggtctacttcatcgcccgtatgatcggctgcttcaccggcggtatcatgctctcgaagatctccaaccacgtcgacattctggtgtgcggcatcatcatgaccgcttccgccgtgtgcttcaccatcttctgctccatcacctccaacccgccggtcgccttgttctgggtggctgtggctctggttggcttcggtaactccaacgtgttctcgctgttcctctcccacgcgctgatgtaccgtccggagcgccagaacgagatttccggcctgatgctcatgggcctaatcggcggcgccatcttcccgcccatcatgggtgccctggctgatgccatgaacgcccagctcggcgccatcatcgtgatggccgttggctgcctgtacgtgctggtcatcggcgttggctacaaggccatcatcgaaggcaagaaggccgctcaggtcgaggcctgataatttggcccgcgttggcggggtttgcctcagcagataaacgacaagccctgtacgaatcacgctcatggttcgtacagggcttttgcatgcgcacttgacacttggctcagtgcacgccacctggcatatcgatttcggtatcgatgatgatggtcaccggcccatcattgaccaagccaacccgcatatgcgcgccgaacctaccttctttgaccggcactcccccggagcgtagcgcctcattgaacttgatccatgtaatatcggcgtgctccggcttgcccgccttgatgaagctcgggcggttgcctttgtgcacatcggcaaacaatgtgaactgcgagatggagagaatctcaccgccgatgtcctgaatcgagcggttcattttgccctgcccatcttcgaatacccgcagattgaggatcttgtgagtcaaccacgcaatctgctggtcaccatcctcatcggtcacacccaccagaatcatgaatcccggaccaatctgctggggctcaaatgtagggtccaatgtgcccaactcattgatcacgtccacggatgcttcagatactcgttgcacgacaactctcatgactccctacagtagcaacaaaaaagcgccgttcccttacagaaacgacgcttgtcttggtggagtcgcggggaatcgaaccccggtccgatgaccgagcccacagtcttctacgtgcgtagtctgctggccaagttggcggtttttctgcccccatcgctgtcgcagacaactgatggcgagcatatccgcagtaaaagtcctgatggagccctgaggctcaactccatcagcaagtcttcttaacgacgctcagcatcctcccaaagacgaagaggagtgaacggagcggctgctcactggttaatcctgactaaaaatcaggcagcgagagcgaactcagtgcggttagatttagcacttattcttttgccggggtcatccacgagcggacccggcgttctcggcacgcttccctgcagcgaacaggtcaccgtcgaaaccgatcgaccccaatcttgaattatcaagcttccagcctttcggccggacgtttcaccatacacctgtatctatgcatttgcaaatcagctcacagcagaccacgaacaagcccgctcacgtcagtcagcccaaacgaccaggaacatcacttcatgataggtttcaacggcgcggatacatcgacctgatgacggtcgccaatcacattggagtcattgataatcttatcgactactgccattttcagcttgagctgagaggaattgccccacacgatcacacggtcgccgtcattgagtgtggtggtcacggaatcctgcgtttccgcagtgacctgggtgattgccgaacgcattgattccggtagcgcacccagaatggtcagggcttccttgatcgaacgattcttcaggctcttatcgacatccttgacttcaataacgggaatgccgtccacattcgcgtccgtcaccgaattcaatacgcgagcctgtgaatcgaccgcagtcaacgtatccccgtttttcagcatggcggcgggccgttgcgctttgacctcaacgctcatcgatttcgggaattgcttggagacgttggcctcactcacgccgggaatatccccgagctgtttggacacgtcgttcgtggataccaaaaacagcgatttacccgcctgcttatcggcaatagagcgaatggtctgctcactgacccattcgttggctccagatacgctgatcgcacccacttccaggcggaacaccgaagagaagaacagcaaccataccagcccaatcagcaccgccacactggttaccatggctaccactcgcagcgcgatgacgcgcatgcccgcacgcttgcgctccttggctcgttcggtgaaatccaccactttcggacgggaaatcactcccagcgtaccggtggtctgatgcagcgtctcagcaacataatcctcactatgcagctcgcgcgcgtctacaaacgcaccttcctgcccgatggcacgcgtcacttcctgaggccgagactcgtccacgatttccggacgggaggccacggaacgggctttacgcgactttccagccttgcccggacctcgctggtgcgattccaccgaacggggtttgcgacgctctcctttcgcgccgccagaactgacggtacgacctgccattactcacaactttcgcgatgggcctcgagcgcggtgagcagcacctgatccatatcagtgatgtcgccggcgcccacggtaaagatcacatccccatggtgggctcgcatggccatcatcctggcggcaagacccatgtcttcaaccggttgaatccactcgccggcagccgcatccttgatgccagcagcagcatccacgatggtggccgcggtaatctccgggaagtcctcctgcttttcacgggcagggaaaatgccggtgacgatgacatcatcggccttggccagcgcctcggcgaattcgtgcgcaaaaaacttggtacgagagaacagatgaggttggaaaatcacgcgaatggtcgactgcggataacggcgccgtgctgcatccagcagagccgcgatctccgtagggtggtgcgcgtaatcgtccaccaccgtgacctgcttaacggttccgtgcacctgaaaacggcgtgcagctcccaggaacgtaccgacagcctgtgcggcgtcggcgggagagactcccaacagcacagcggcggtgattgccgcggcggcattacgcgcattatggatgccgggaaccttgagttccacacgctgggccacagcatctgcagaggtcaccgcggcgggaaggtgcaaggtaagccgttcaacgccggtgccggcggtctcctgttcagaggaaatccacacatgcgcggcaccccctaaatcaggcagctgctcaatgggcgtggtgccatagacgacggtatgggccttgacgtcggcaggcagcgcctggaacacggccagcgcgtccggatcatcagcgcagatcaccacatggccggttgcatggccggcatgattcacgaatgcggcacggtaatgcgcttcatcgccgtaatggtcaagatggtcggcctcggcattggtaatgatggcgatggtggggtggtatttggcgaagctgccgtcggactcatcggcctcagccaccaacacgtcaccttgaccggcatggccaccgtccaaggtggtaccgtccggcccttggatggaaccgccgatggcatagctgggatcagctccggtatgcaccaaaatgtgcgcaagcatggaactggtagtggttttgccgtgcgcaccggccacggtcacggctcgcttgccgttcatcagtaaagcgagaatatcgctgcgatgcacgatgtacaggccagcctcgttcgcggcaacgatttccggattgctgggcttgatggcactggaataaacaacggtcgaagccgaagccacattttccgcccgttgcccgaattcaacggtgatacccaatgattccagtcggtcagtttttgcactgcgctcacggtcggagccgtccaccgacacgccctcggcgttcagcatctcggccaggacgctcataccggcacccccgataccgatgaaatgcgtagggccaagatctgcgggacgggccgcagcatcgaacgaagcatgggtagggtcaagcacaatgggctgattctgggacaattgacgctccttgagggatttccagcacctctattatggctgtaccccgtgccaacgcaacgaggtatggccgattctgatcaaacgtgaatttaccggttcctattgagcaagctgcaggacacggcgcgccatgatgcgcgcggcatcacgtatgccgtattcccatgctttgcgtccaaattcagcaagcatttcgtggtcggcaagcatgcccggcacatgatcatgcacccatgccggcgtcaggtccttatccgctaccagcagaccgccaccagcgttcaccaccggctccgcattaaagcgctgttcgccgttgccaatgggcagaggcacataaatggccggcaatcccagcgccgccagctccgataccgaaccggctccagcacggcatatcaccagatcggcgcaggcaaaggccaagtcaatccgctccagatattcagccacgtgataatcgccttgacctgccgaatcggggccgattccagtaagcacatcagccttcaccgacttgctgaccatactgcgcacctcatcgcttttgccacgtccggtcagatgaatgatctgagcatgggccagcaaatcagcggcggacgaggcaatggctcgattcaggctctgcgcgcccagggaacctccggtgaccacaaccacaggacggtttggatcgatgccgagctcagcggccgattcctttctcacaccctcgcggtcgacttccagtcgctgggaaagcgcggcaatggccggacgcaacggcagaccgacacgctcgagtgcagcgccttttctgggtttcagaccggtttcgtcatacaccgtaccgatgaagtcggcccatcgcgctcccaacttgttggccatgccggcacgcgcattttgctcgtgtatggcgatggggatgtccatcttatgcgccgtggcatacacgggggccgatgcataaccgccaaagccagcgaccacgtcggcatgcctgctctccaaaatggtgcgcactttggccgtttcgcgcttccacttggccgggaattgcagcaaatacgcattggggcggcgtgggaacggcactttctcgatggtgtcgagttcgtatcccgcttgaggcaccaaatctttttccaagccgaccgcagtgccgataacagtgacctgcgccgcgggttcaagttcgcgaatcgccccggcgacggcgagtaatggattgacgtgtccagcggttccgccgccggcaagaacgatatgaggtgctccttgggtcatgactaccgagtgtactctacacgctctggcgagactgcttaatctgcggttggcatcgcataagtcccacaactagtcctgcggccgccaaacacatcaccattgaggagccgcctgccgacacgaatggcataggcacgccaagcaccgggaacactcctacgaccacgccgatattgaccatggcctgtcccacaatccagatggtcacacacatcagcaccattgatacgtaccgatcagcgacctgcagcgcaacgacgatcatgcaccatcccagaatcgcgaagaacaggagcactatggcacatcccacgaagccggtttcctctccgatgatagcgaagatgaaatcgttatgcgccgctggaagataattccacttctcacgcgaattgccaatgcccacaccaaggaagccacccgaagcaatggcgtacttcgcatgcatggactgatagcacaccgtctgtgcgtcggccgcagaacaatccccgtacgtggcgagaatacgccgcatacggttcgggctggaaatcgccagcaccgccaccatcgccgccatcaccagcacgcctatgcccatccatttgcccggaaaacccgcaatcaggaaagccacaatgccgatgaaaatcagaatcatggcagtgccaagatccttaccgccaataacggtcaacaatccgaccgcagaaacgccaagaggaactgtataggctttcatgccttgtttgcgatagagctttttggcggctctcagcgcggtgggaagccacacgcacagcgcgaatttcatgaactcggccggctgtatggtggtgaatcccagattcaaccatcctcggttgccgtacacgtcaatacccaacggtgtgaaggtcaacgcctgtacgagtatcgagcagagcatcagcggcagaccgatgcgtttccagaacccgaccggcatcaccatggcaaaaaaacccacaatcaggccaaggatgcagaacactccctgattgagcaattgaacaaatggcgatttgccttgcgccgccatggtgaccgtggaactggagaacaccataatcaggccaaagcaggtcagtcccaccaccgccatgcggaaaccgttatagcaccacagcggattgagcaggcttcgccagccggtgtaatcggtaatgaccagagccggcttatttgcattcccgtgcgatttgcgaaccgaagaattatcggagaccatgcacctcgctccatgccttggctgcggctgcaaaacgattgcctcgatcggcataagacacgaattgatccatggacgcgcacgcaggcgccatcagcaccacgtctccggctgccgcatagtctccgcaggcagccaccgcacgatccatcaccgtatcgttgtcctgcggatcgatgacggtcaccggaatgtccggtgcttggctgcggaaggcttcaatcatcggctgctgatctttgccgataatgacggcggccttaatggtatgagcctgattgctgaccaaatcctcaaaacggctgcctttggccaagcctccggcaatccagaccacggacttggccgagaagctggacaacgaagcgttggcggcatggccattggtggccttggaatcgtccacgaatcgaataacgccgccgttcacacgtgcttcggccacggtttcgatacgatgcccgcccggtttgaatgtctgcaacgcctcaagagcggtttcccggtcggcgccaaggcccaaaaccaacaccagcgcggtcagggcgtcggcaaccaggtgtgggtacaacgagccatccggctccatcaaatgggtgaaatcggcgatggcggcgagcttgataggctcccccactttgccgccggcaacgccgctgcgatccacaatccagccgtccgcgatgccaatctggccggcttcaggctcgttcaacgtaaatcctactttgcggcatcctgcggcaacgggtgcggcttgagccagttcgctaactttggcgtcctgcgcgttataggcgatgacgcgccgggcggcgcggaataccttggatttatcggccgcgtagttctcgcgcccgccatgccagtcaagatgatcgtcggcgatattggtgatggctgcacagtcaagttccaaggaatcggtgaaatgcagctggaaggagctcaactccacgcagagcacatcatgcttggggttggtggcgcagcgggacaggctcatgctcatgtctccagaggcaatgttgccggcggtgggtgcatccagaccacacgcggtaagcatctccgaggtcatttcggtggtggaggtcttgccgttggttccagtgatgccgatccaaggcgcaggcttgccggtcctcgcattatccgcgcgcagacaccacgcaaattccacctcgctcatcacgggaataccacgacgctgcgcttcgagaatgaacggagtacgcggattgaacaccggcgaggccatcacataatcgacctgatcccaatccacctcgtcgaaggaatgcaaatcagcatcgctttttcgttcgtctacaccaatgacatgggcgccgcgctcccgcagcacctcggccaacgaagtgccggacactcccagtccggcaatcaccactgtcttatccgctacttgcatgattcctcccaaatttaggaataccgtgggcgagcttaggcccttcagatttccgctagctgaacagcagtccggatcgggtgacccagtcacagtagaaaatggtcagggcgagcagcacgaagatgagttcaatcatccagaaacgcactaccaccttggtctccgtccagccttcaagttcaaaatgatggtgaatcggcgccatcttgaatacacgcttatgcgtcattttgaagtatcccacttgaatgacgtcgctcatggcctccatgacgtataggccgccgaggatcacagtcaggaactcggtgtgcgtggcaatggacagagccgcgaacaggccgccaagtgccagggaaccggtatcgcccatgaagatggacgcagggttcgagttgtaccacaggaagccgaagcacgccaccgcagcgcaaatcgcgatgatggtcagatccagcggatcggacacggcataggaatagccgccatgatcgccacccttgatgtggtagctttcccaaaacgcgatgacggcgaatcccacgaaggagatcatcgacgatccggcggccagcccgtccagaccgtcggtgaggttcactgcgttggtccatgcggtcatcaggaagttcacccagataacgaacaggatgatggccaccgcacggcccgcaaaatcaaagctgaaaaacggctgttcaatgaagctcataccaggctgtgcgctggggaacccggatttggtggggataatcagcgccagcaccgcatagatagtggaaagaatgaattggccgatgaacttaccgcccaccgtcaggccttcattctgcttcttgcggactttggcaaaatcgtcgatgaatcccaacacgcccatggacagcatggcgaacagcaccagcaccgcagaccatgagggcacatcacccgatcgcaggtatcgatacaacgccgaggcgccccatcccagcacaatcgcaaaattgataaccacaccgccaagcgtgggggtaccgcgcttgaccagatgcgattgaggaccgtcctgacggatgtactggccatagtgcagcttgtgcaccagacgtatcagcaacggcgtgccgaccaaggtgacaatcagcgacaccagcattccaataatcagagcaatcacgtgtggcttctctcctcttgtcggtcttcttgtcggttcagcgtcaggcccaccgctcagccaatgcgctgagtccggaggcgtgcgagcccttgagcagtaccacggtatccgtatgattcttggccaagtcaaggactatgcgctcggcctcatcaatggtctgcacacagtctaccgaagccgcacgcccacgtgttgcgccttcggccaaagattcggccaacacgttcagatgcgcgtctgagggcgatccgaccgtgatgatggcatccagtcccagaccggccgcatattcgccgaccgaagcgtgcaattcacgctcatccgcaccaagctcgagcatcgcgcccagcaatgccacacggaatggctggcgaccatcattcgcattccatgctcgcaggccgtccaatccggctttcatggaatccgggttcgcgttgaaggaatcatcaatcagctcgaacgaagctccttgacggctcaccgtggatagagccatacgatgcgggctgatggtgtgctgcgcggccaacgtctgtgcaatagcagtcagcggcatgccatatcgcaatgcgacggttgccgcggcaagcgcgttcatcacattatgacggcctggaatgcccagatgtacggcaacctgctcgccgtgcgcgtcggtcatggtgaattcggcgtgatcagcggcatctgcagcaatatgatcggcatgcacctcggagtcacgggtgtgcccctgaccaaaccacagtacgtcgccggaagccaactgtgccatgggcacgacgtaatcgtcatcggcattcagcacggcggtgccgccaagcagcagcccctgcacgatctcgcttttcgcttgggcaatgcgctccctggaaccgaattcgccgagatgcgcgactccgaccctgagcacaataaccgtattcggcggtgcgatacgggtcagccgcgcgatctcaccgatatggttggcgcccatttccgctacgaaaaaacgggtgtcggcattgactcgcaatgcggtcaacggcaagccaatctcattattgaaagaaccgatcggcgccacggtgggacccaacgtgctcagcagcgcggagagcaaatctttggtggtggttttgcccaccgaaccggtcaatccgatcaggtcaaaggcaccgggcagctggcgccgacgatcgatattatgcttggccagcaatcccaatgctgcgacggtgtcttcgaccacgatctgcggcatcgttgtacacgctacttcatggtcgacgatggcggctgcggctccttggtcagcgaccttatccacgaagtcatggccatcgacccgctcgcccttaatggccacgaacactgctccggagccagcctgacgagaatcagtcaccgtttcggtggcttcaatggcgggaccgtcgcctgctaccaaccgaccgtcaacggtcttggcgatttcctccacgctcatcgggaccatggtgtcttgaactccttcagtgtgtcgtatattgctgtattgtattgcatccgctgcacgtcatctgagattattggccactcgcagagcactacgcacgttgttcctgcgcacgcctgccgcgagcaccatggcaacagcaagagacatatggccgagcctatcctggtcaaacatggcgggcgattcggccgccagttcgtcagactccccagtaggtacggtcagagccagggcacggtcggatacaaacgcatatcgggtttttaaggaggccacatcctccccttgcgcgactcgctcggagcccagcacgtccacgttcactgattccaacgcttcacgttgcagtgtggcgttattcatcgcgatgataacggcggcaacgccgtcctccgcgcagaccgcgagggtgcgctgcacatcgaggatgcccaacggatacgaaaggttcaaagaacgcgtcatcgacgtggaaccagtggaatcgatcacggcaacggggttgcccagcatgtgcaggaaatcggcaagatgcttcacaccggcatggatgatgtcatcatcatcgccggccacggcaaataccgccatagcattggatggggttcctgccagagaactggccaaatcaccgagcatatggttgccgcaatcgccgaacaccagcgggatgccagactggatatcccggccacggcacgttctgggcagcagagccgcataggcaccggattgctcggcacggggcagatcggcaagatgattgctgtcgcagatatacatcgcgccaggcgaaatggtgtctacagcatcgctgagcgatgtgatggtgacattggacgcaaattccggatcaatatcgaaaccataccgctcggccagcatgcccaaagtcattcgctgggcgatggattcgctcactgcgctcatgggtcaacgcctttcttttcgatatatcaccaagtgaccggaatagcatctttacgcggcgtcgagataggcacctcgtatttctgcataaggaacgcacaaatctgcgcggataccgggcctgcggtcaggccaccgaaaccagtcgggtccttgagcaccacagtcacgacgaaacgcggattgtcggcgggaatggccaccgagtaatcggagatgatggaggacagcttgccatcggcgccctgcacctcggcggtaccggacttcgcggccatgcggtagccatcaaccttgatgaaggcgctgtagctatccgaaacggactccatggcatccatcatctgagcggccacctgctcatcgaccacgcgagtggccttgctcttgttttcggtgttgccgtcatccgacttgatgatggactgctgctgcttcactcccttattggcaatggtggccacgatgttgctcagctgcaaggcattgaccgtgtatccctgaccgaacagcacggtgttgcgagttcgcgcatcccatgacgagggagaggtcagcacgccactggactcgccaggcagatccaatcccgtggactgtccgatgccgaacttggtcaagtattcgtaccgctgctcatccgtgtagccatcgccggccatgaccataccgatattcgatgatttctggagaatgccagccagagtccaatgctcatcaccatgctcgaaggcgtccttataggtctggccatccacagtgagctggcctggcacggtgtactgatccgtcggtttgcgcaacccggtctgcaaataaccggacatggaaataaccttgccgatcgagcccggttcaaaggtctgggacacggctcgcgaaacgttcatcttcgcttcgtcactgccggccgctatctcatcgctgtccgccagagccagtatttcgccgttctgcacgttctgcaccacggcgataccccactgggcgctgtactgggctgtcgcttccttcatgatcttcttggcataccactgcacatcacgatcaatggtcagcgtaacgtctttgccgtccttggcggccacggattcggtcatggtgccgggaatctcttcgccaccgtagttgccacgctggtaaatctggtgtccatcggtgccggtgagcgttttgttttccatttgctcgaatccggccacgcccacgcctttgtcgttgactccgccgagcagcgatcccatcagttctccatcagggtacaggcgttcgctgctgagttcgccccagacgatgccgccaaggttcaaatcgtcgatggtgcgcttgacctgtggcgtgacatccttcttcagcacgacgtattggccgctgatcgacagatccgcgcccagctccatcgcattcatgtcaagagccttggccagcagacggcccactgcggcagcgcccgtggcacccaccggcttgccgtcgatctcgtcgcagtagtctttggtcttctcgttgcaatcggtgggaacgaattcctgggcagcctcggggttggccacaatggtatagcgttccacgctctgggcgagcacagtgccgttggtgtcaaggatgcgtccgcgcttggcgctgagcgtcacgcgcgaagtacggctggccgtcgcggcctgcgcggtttgacgtccgccaatcaattgggtggaggccagctgggcaaggcacattgttgccacgatgcccaatgccacgcccacggcgatgcatttgaaggcaaaggtcttcaccttgtacaagtgaacgatacgtgcgatggtggctttcactgtgctccactttctccggactgctggtatccgttcaaatcaatagtcaccgatccgccttgcgacaccatgcccatttcatcggccttatccggcagcgatgcgaccaactggtcaagcttggcctgatcgtcttcgatgtcctgggtcagcgtgctgatatgctgcttgacttctgccgccttaaacgagttctgcaccatttgggtgcgcagtaccagtgcgccgagcaacgtggccatgaggaacacgatggcaatcaccacatgcatcagcggggcgctgcgtgtacgggtccattcaataacccgttcaatcatgtttccttctgcttgaacccgctgaccggaaatcaccttcagttcagggcgcgaaggagcctgaggcctggactgcggcctggactgcgttgaagcactggatcgaatgctgcgtgccgttgctgccatggtcagcccctccttccgtgtttgccgttgttacgcgtggtgttcgattcctttgggtttgccgctgtttgcgcgaagcgttctcgccacctctcaggcatccgtctgctcagctcgaccgccctgagccgcactgaagcggatcgcgggttgcgttgccgctcctcatcatcggccttgattgcgcctcgggtcagttcccggaagaacggctgggcgtcatccggcacgattggcaggtttgccggcgcatcaatcttcaggccctgtgccataaaggatttgaccgtcttgtcttccagcgagtggtaggactccaccaccaaacggcctccgacctgaagacgattcgcggcctgaggcagagtggatgacagtttgtccaactcgccgttgacttcaatgcgcagcgcctggaacacacgctttgccggattgccggccggacggtgagctttgggcaccacatcttcgactagagcgttgagctggccggttgtggtaaatggcgtctgcgtgcggcgcaacacgatctcacgcgcgatctgacgagcgaaccgctcctcaccatattcccggaagacgcgaatcagcgatgccatatcgtaatcagcgagaatccgctcggccgtgagattctggctcacgtccatgcgcatatccaacggggcatcatgggagtacgagaatccacgatccgtttcatcaatctgcaaactcgacagacccaaatccatgaacacggcatccactcgttccacgccttgatcggcaagcacctgatcaagctgatcaaaggccgcatgaaccggcgtgaatcggtcggaaagcccctcctgaaccatacgctcagtcgccaaggccaacgcctcactatcacggtcaataccgataagacgagcttgcggcgccgctttcaggaaagcggtggaatgaccggcaagacccagcgtgcagtccacggccacggcaccttcgtgttgtaatgccggcgccacaagattcacacagtcatcaagcagcactggctggtggatattcgtcacatcaatcatcagaactccacctcaggcagtacatcatcggcgatatcggagtatccctcttccttttgtgcgaggtaggactcccatgcatccttgttccacagttcggcgcgcgtacccacaccgatcaccacaatgtcggacccgagattggcgtagtcacgcagcatttgcggcaccacaactcgcccctgcttgtcgggttcctgatcgactgcgccagacaggaacacacgcaagtattcgcgggcggctttgttgcccaccgaagtgcgctgaatctgggaggcaatacgacgaaattcgtcaaacggcaacaggtacacgcaacgttcctggcctcgggccattaccagcccctggccaagctgggaacgaaatttcgcgggaagtgccacacgacccttggcatcgattttcggcgtgtacgtgcccagcagcagcggaggcaggccggccatgaggccgtcgattccggcggagccttgctgatcagcatcggtttcacgcgagtgcttgctctcgaccatggctccacctcctttgtactcgccgggtatacttcagccaaccgattcaccactttaccccaccattcaccatttttccccactacaacacgttttactcacctttttggaaaaaccgtcacgattgcacacggccgcgaagcggaactcaccgaccatcgcaaaacgcaaaaaagccgtcaccgatttggaaacgcatcgcgcgcggcgtgggcaggcacatcaccagagcagccgcaccactgcccttccccgacgtagggggtgtgcggtaaatttgaatgccttaaagtttgtgaccattacgagcggagacgaagagaagcatgtcgagttacgcctcacagctgcacgaggagcagcaggccgtcgatcgcgcctatggacgtctggatgacctgcgcgccgaaatgtggcagcgactgagcaccgtacgagcagccggttcgcacggctcccccacccaacgcaccgagcgcgattcttttgccaccatgtacgaagatcgcctcactcagctgcgcagcgtggaagaccggctcgtgttcggacgacttgactcgcaagacggcactcgtcattacatcggtcgcatcggtctgtcgagcaccgaccatgaacccattctgaccgattggcgagccgaagcggcccgccccttctatgaggcgacgccctccaaccatggcgacatcgtgatgcgccgccatatcacgttgagtttccgcgaagtggtaggcgtcgaagacgaagtactggacgtgcattctgaccaagtgggccaagcctccactgccggcaccctgaccggcgaaggtgcactgctcgcttcgctcagctcgcgtcgcacgggcaaaatgaccgacatcgtggccaccatccaagccgagcaggaccgcattatccgctctgacatgaaccgtgccgtggtggtacagggcggaccaggcaccggcaaaaccgctgtggccttgcaccgtgccgcttacttgctctacacgcatcgacgcacactggaacgttccggcgtactggtggtgggccccagctccgcgttcctgcattacatcgatcaggtgcttccctcgttgggcgagaccggtgtcgtctcccgtacaatcagtgacctgattccgggaatcaccgcatcggcaatcgacactccgcaagccgccaaactcaagggcgaccgtcgcatggcacaggtgatcgccaacgccatcgcctcccgcatccgtgtgcccggcaatctgccgaccgtcaccatcagcggcattcagataccgatgcttgccgtcgatatcgaacaggcgcagtccgacgccaaacgcacaaggcaaccgcataacaaggcccgagagacctttatccgctccatgctgcgcagcatgcagacccggtatgcggagcaactcgactacacccccgatcaggcggagctcaatcgcgccatgtcgctgctgcgcatgaacgaacaggtgcgcaaaacgttgaatctgtgctggctgccgatgaccgccccctggcttatcgaccagctcttcgctcacccggaacgcctgaagtccttggccggatggatgaccgatgacgatctggccactctcgcacggccgaaaggttcacctctgacccggtcggatattccgctgcttgacgaggcgatggatctgctgggacccgatcccaaaaccgtggccaagcagtccgccgccaatgccagacgcgccgccgaagagcagtacgccaaagacacgttggccgcaaccggcctcggtcagggcatcgtatcgagccagatgctgctcgatcagatgaacggcgacgacggcgagctcaccgcccagcgcgcagcagccgatcgagaatggacctatggtcacatcgtggtggatgaggcgcaggaattgaccgcaatggattggcgaatgctcattcgtcgctgtccgtcacgatcgttcaccattgtgggtgatgtggcacagacctcggcactggccggcacccgccgttgggacaagacgatgaaccgactgttcggcgaaggccattgggacctcaatgagctgaccatcaattaccgcaatccgcaggaggtctccgacctcgcctcccgttttgcgcagaacgaaggactctatatttccacggtgaacgcggtccgcgccttgccggattccgtgtctcgacacgtggtagacgacatgaaggctctgcttaccgttacttccaaccaggcggcacagctggccaatcattttgtttcggcggacggcactggacgcatcgccatcatttgcccggacgacctcattaagccggtgcgcgaagcagtaaggcatcgcctatccagtctgatggccccatccgaatatcagcgtcttatcgaccagcccgaatgggatgagcagatcagcgtatgcggcaccgaaatggtcaaaggcctggaattcgacgctgttatcgtcattgaacccggacgcatcgaagatgacgccccaagccgtttggtcgccgcatccgacctctacgtggcaacgaccagaccaacacagaaactggttatagttcggacaaaagaggacgagcgttccctgaacatctaaggtgaaagacatgcctaaagcactgttactggaaaacatccatcctgacgcagccaaatcgctgcgagatcacggcttcgaagtcgaaaccatgaagggagccctgaacgaggacgagctcatcgacgcgctagagggcgtggatctcgtcggcgtgcgatccaagaccaatgtcactgcacgcgtactgaatgcccgcccgaccctcagcgccatcggatgcttctgcatcggcaccaaccaagtggatcttgattatgccggcaagcacggcatcgccgtgttcaatgcaccgtattcaaacacccgttccgttgtggaactggtgatttgcgacatcatctgcctgatgcgtcgcatccctgcgcatacgcatcacatcaagcacggcttgtgggacaagtcggcctccggttctcatgaggtgcgcggcaagacgctgggcatcatcggatacggcaacatcggttcccaactgtccgtactggcggaagcgctgggcatgcgcgtggtgttctacgacatcgaggagaagctcgcactgggcaacgcccatcgttgctcgacgctgaacgaactacttgagcagtctgatgcagtgactttgcacgtagacgggcgcaagtcgaacaccggcttcttcggcgaggatcagttcgcgcacatgaagcaggacgccatcttcatcaatctgtctcgtggattcgttgctgatttgggcgcgctgaagcagcatctcgactccggccatctgtccggtgccgccgttgacgtgttcccggtcgagcccaagaagagcggcgacccgtttgagacggcgcttgccaacgaagataatatgattctgaccccgcacatcggcggttcgacgctggaagcgcaggagtccatcggtcactttgtctcccaacgcctggaggattactggtcgaagggttcgacgtcactgtcggtgaacttgccacaaatcaatctcaccgattgcaagggtgtatgccgcatcgcgcatttgcatgacaatctgcccggcgtactcgcccatgtgaaccgcgtgcttggcgaggagaacatcaatatctccttccagtcattggccactgaaggtgagctgggatatgtggtcaccgacgtggctcaaaagcccagccccgccacactggaggcattgcgtagcatcgaaggcaccatccgcatgcgcgtcatcggctgataccgcatcgacataaactgcatcagcacgacagaaggcccgtcatcagacgggccttcctcttggtatcgaaccattattcgcgcaattcatcgatggcgctctggaaatcttccaggccggagaaattctgatacacgctcgcaaaacgtaggtacgcgaccacatcaagatcacgcagtggcttgaggattgccttaccgacctcgccggaagtcacttcggccagtcctcgagagcgaagatcctcctcgaccttctgccccagcagcttcagatcctcctccttgacaggtctgccttgacaagccttacgcacaccggagataaccttatcccggctgaacggttcggcgccgccggaacgtttggtgactagcaacatgctggtttccacggtggtgaaacgcttattgcatttcgggcaaacgcgacgtctacgaatggaatagccgtcgtcactaatacgggtatcaatgactttggtgtcaggattctggcaaaaagggcaatgcatgtcccccagaataacgtgaacacacggaaaaacaatacttatcgagtgttcctttactcagcaggaacaattaggcgttgtcccgcacgaagagcccctgactccagattgttcaacgagatcagctcatccaccgtttccgagacatcttgcccggcgggcgtgatggaggatgcatacgaccacagtgtgtcccccggacgcactatatagctgatcacctgcgtggcaccggtatcggagcgcgccggctcagccgtcagcatggcgaatccgccccacgccagggctgccgccaacacgaccgccatcaccttaccgcgacgatcgcttcgcacggcgttggttctacgcaccgcaccacgacgcgcagcacgatatgcgttgctgcgcttccccgccatacgacccattgccatcaccatcgaaccagtcatcacgaccacctctctcgaacaagtgttctatcgaacatctgttcttagagtggcacaaatgttcgaactcgtcaagtcaatactcgaacagatgtttgatttcacacgaatatcacgttatgctggtgaggtaacgaaaggagccccgacgtgagcagcattcccgccccccctcagcaggagccggacgaatccactttgaccgagcgccagcgcaaagttttggatgccattcgactccacatcgacgaacagggctttgcgccatcattccgagaaataggtgaagctgccgggctcaaaagcccttcctcagtcaaacatcaactgcaagtgctggaggacaagggctttattcgcatgaacgccaataaaggtcgcgccatcgaggtggtcgctccaccaccggaaaacactgcagcagtcaccgcgaacaccgtagaagagcacaccgccgatatctacgcattccccagtgagtcaatcgccgaatcacaggatgttccgctggtcgggcgtatagccgccggcgtacccatcaccgccgaacagcacgtcgacgatgtcatgcgtctaccggaacgactgaccggctccggcaatctgttcatgttggaagtacacggcgattccatggttgatgccgccatctgcgacggtgacttcgtggtggtgcgcgaacagaactccgccgtgaacggagatatcgtggccgcactgctggatgacgaggccactgtcaagaccttccgcaaagaaaacggccacatctggcttatgccacacaatcccgcatactcccccatcgacggcacttacgccacgattatgggcaaggtcgtcaccgtattgcgcaagctatgaatttttctcgcagccgattcgctcatatcgtgctatagtcgctctcagttcatgaaaccccggcctcgcgccggggtttcgtcgtatttgcaccataacggaaatggaaatgagaagcggtttcaacaccgtgcataaggaggaacagacatggctcacaatcatgcaccggcaccatcaccatcatccggcgtcgacgcggccgctcaccagcgccgcctcatcgccacgctggccgtcaccggctccgttttccttatcgaagtaatatccgccgtgcttaccggatccctggccctgctcgtggatgccggacatatgctcaccgacatgtcagtattggttgcctcgaccatcaccgcggcactgatgcgccgcaaaccaagcaatacgcgcacctggggctgggcacggctcgaagtaatcactgcggccgccggcgctgttgtgctgctcatcgtaggtatctacgcactgatcgaagccggcatgcgtttgttcggtggatccaaagcggagatcgacgatatcggactgctgctgttcgtcggtattctcggcctcgcggcaaacatcatctcaatcttcatactcgcctcgcaacgcaaagacaatatgaatatgaaggccgcattcctcgaagtgatgaacgacgcactcggatcggttgccgtggtggcctccgcattggtcatgatttccaccggctggaacggcttcgacgccgtggccggtgcggccatcgcgttgatgatgattccccgtgccatcaagctgctgtccaacgcggtcaaggtactgttggaagaaactcctgaaggacttgacctcgacacggttcgcgagcaccttgaaggcgtgccccacgtggtcgccgtgcatgacctgcatgccagtaccgtatccaccggcatgccgattctcatggcgcacgtggtggtggaacggggactcaccatggaacaggcagcgggcatcctcacccaacttcaggattgcctgcgcgaacacttccccgtctcagtcccccacaccacgttccaactggagcccgaaggttacagctccccctcctccaacgaactccacgaatgatgcgctgtggagcgcccccgtcgttgcccctcggtcgacgtacctcgtacgccttccctcggtgcgtctagaggccgcacgcgcagaccattattcgcgcaaataaataatcctcgactcaatcgagtcgaggattcccgttcgatataaaaatcgttctgcgcgtgcggcctctagacgcggcaggcgaaggcgtacgaaggtacgtcgagcctgccgtaacgacgaggacgtccgcagaacgattttttatcagaagccgaactgggcagcggtttccttcagcgtctcggcggagcgcttcagagcggcgagctccttgtcagacaccggggtgttgatggcggtgttgacgccctgacggttgaggagggtcggcacagacatgcagatgtcggagatgccgtggaagtccttgagcatggagctcacaggcaggatgcggttggtgtcgtgcatgacggcctcgatgatgtcaacgccggacataccgatggcgtagttggtggcacccttaccgttgatgatcttgtaggcagcgttcttgacttcctggtgaatctcctcgcgcttggcagcatcgagcggttcgtgaccgggcagcggggtccagtcgcacatggggacgccaccgatggtggcggaagcccacagcggaacctcggagtcgccgtgctcgccagcgatgtaggcgtgcacgttcttgacgttgacgccggtctgctgggcgatcaggaagcgcagacgagcggagtccaggttggtgccagagccgaagacctggttctcaggcagaccggtgatcttctgagccacgtgggtggcgatgtcgaccgggttggtgatgagcatgtagatagcgttcggagccaccttgacaaggttcggcataatggccttgagaatgttgacagtggcgccaacgagctcaagacgagactggcccggcttctggcgagggccagcggtgatgacgaccatgtcggcgtcgcggcagatctcaggatcgtcggaaccggcgatggacacagtcgggtagaagctggagccgtgctgcatgtcgagcacctcggcctccacgcgctccttggcgatgtcctcgagcacgatctcgcgagcgacgccacgctgtgcagcggcaaaggcaagagtagagccaacggcaccggcaccaataacagcaagcttcgtgggcttaacggtagtttccgccatgatggataaacctctcttcaaaggcggtctgctgatgaatggcaggccttgtaactaacggtttcactttataaacccgctaagacgtttcgcgggccacaatgcatatccaatgatgccataaccctaatgttttcagcagttgttagcgctcacagccattatgtgattttcgtcacgttatttatgcgattgattgctccatgatttgcgcagccaagtgcgaatcgacatccgcttcgagcgccactccgtcatcgcgatattccacggaatccaccttgccgtattcacgtacacgggaaagcagagaccccgccgtgtacggcagcaacgcattgatatgcacatgcggcacgggcaacagctcttcgaccgcatcgcgcaacgcatccaatcccttaccgctgtatgccgacacgatgaacgcatctggctgcaaggcggccagacgttctcgcttggcgtcatcaatctgatcggccttattgaacacgagaatacgggggatggaggcggtgccttcaatatccgcaagcacatcgttcaccgcatcaatctgggagaacggatccgggtgggagccatcaaccacatgcacaatcacatcggcctctcccacttcctccagtgtggatttgaatgcctcgaccagctgcgtgggcagtcgacgcacgaacccgaccgtatccacgtaagcgaatgcacgcccgtcatgggttttggcacggcgcaccgccgtgtccagcgtggcgaacagcgcgttctccaccaattccgtagaccccgtcagccggttggtcaacgacgatttacctgcattcgtataccccaccacagccacggtaggcagcccgaatctcctacgggagccacgcttgatctcgcgcgccggtgccatttcgcgaatctgccgacgcaagcgggcgatacgcgcacgaatcacacggcgatccatctcgatcttggtctcgccaggaccacgcgatccgatgcccgcatccgcaccagccgcacgaccaccggcctgacgggatagagatccaccccagccgcgcagtcgtggcagcatgtattcaagctgcgcaagctccacctgggccttgccctcacgcgaagtggcatgctgggcaaaaatatcgagaatcaccgcagtgcgatccaccactttgactttggcggcatcctcaagtgcacgacgttgagacggtgccagatcatcatccacgacaatcgtatcggcctcttcacgggccacgatatccgcgatttcccgtgctttgccggaaccgacatatgtagcggcatccggcttggaccgatgctgcaataagccatcgcacaccacggcacctgccgtttcggcgagagccgccaactccctgagcgactcctccgccttggcctgggtggtcaccgccgatgaccagacaccgaccaacaccacacgttcaagacgcaccttacggtattcgacctcagtaacatcctgaagctcacccaagccggccacatgtttcagctcgttacgggcctcacgctcctcccattcctggttggagtcttcatgccatcccgcggctcgttgggtatcgtcgagcagcacattggattggccggacaacactcccgatggggcttcatcagcgtcgctgcgatcaatgtcggtgtactgggtgttgtcggtcaaaggcacctcggtgtcagtcaagtgttcacgattcttctatgcctccttattatcatcgagtgaggtgacatgccagcattggcatatgcaagaagcgggaaacccgcgggaatggagcgaaacatggccgaacagtatttctccgcggagccatcgtcaaaggacgtgcgccgcacgctcaatgtgacgttgcaaggtcatgatgcccaagtacaggtatcgaacggggtgttttccggctcccgcgtcgacttgggcacttccgtgttgctcaagcacgctccggaaccgccggtatccggcaatgtgctggatctgggttgcggctgggggccaatcgccctcgctctggcgttcgcatcgcccgaagcgaacgtatgggccgtggacgtcaacgaacgcgccctggaactcacccatgtcaacgccgaggccaatggctgccgcaatattcacaccacacaggtggatgaaaccagcaccccactgccagccgaccgccagagcgcacattgcgagccgattcccggcgacctcacattcgatgcgatatggtcgaaccccccgattcgcatcggcaaggaggccttgcatacgctgctcatggcctggctgcccaaactcaaggtgggaggagcggcttatctggtggtgcaaaagaaccttggctccgactcgctgatcccctggctggacgaatcgctgggcgaagggttcactgcaagcaaatacgcgagctccaagggcttccgtatcattgaagttcgtcatgaaatatgagtatcctgccgaacttcccgtatccgccgcacgtgatgagatagccaacgctgtccgtcgttcacaagtcgtcattgtttccggtcagaccggttccggcaaaaccacgcagctgccgaagattctgttggaactcggccggggcacacacggcaagcagatcgtgcatacccagccccgccgtatcgccgcacgcacggtggccgaacgcatcgcctccgaaatgggcgtacgtctgggcgatgaagtcggctatcaggtgcgcttcaccgacgaaagctccccgaatacgcgtctgcgcgtggtgaccgacggtattctgctcgcccagattcaacgcgatccgaagctcagccagtatgacacgatcatcatcgacgaggcccacgagcgcagcctgaacatcgactttctgctcggatatctaacggccctgctcccccagcgtcgcgacctgaagctcatcatcacctccgcaaccatcgattcggtgaagttccaagaacatttcgcgcacgcattgcacgagaaagtaccagtgatcgaggtgtccggccgcaccttccctgtgcaggtggtgtacgaaccgctcggcaccgcacccgcactgatgcgtgaggtgccgggctttgcgaccggcgcccgccccggagacgccgactatgacgagctggcgagcgccatcgccgaatccgatgccgatcattcccgcagacgcggcaatgccgattacgccgacgacggcatcaccgacatgcccacagcggtggcccgagcctgtgccgagctggtcatccattcctcccatgagcgcggcccgcgtgacattctggtcttcgcttccggcgagcgcgacattcacgagttcgaggcagctctgcgtcaccattacggcccgcgagccgatgacatgcaccgccccgacgccattgagatcatgccgttgttcgcgcgcctgtcggccgccgaccagcacaaggtgttcgagtctcacacccatcagcgcatcgtcatcgccaccaacgtggccgagacctcgctgaccgtgcccggtatccgttatgtggtggatcccggcaccgcgcgcatctcccgttattcgaagaccgctaaggtgcagcgtctgcccatcgagccgatcagccaggccagcgccgatcagcggtccggccgatgcggacgtgtggccgacggcattgccatccggttgtattcgcgtgaggattacgagacccgtccccgtttcaccgagccggagatcctgcgaacctcgctaggcgcggtggtgctgcacatgctctccgtgggcgtggcccgtacggcggaagacgtcacgaacttcggtttcatcgacccaccggacatgaaggctgtgtccgacggattcaacgagctgaccgagctgaaggccataggccgcaagcgtggcgaggtgacgctcacccataccggtcgtcagctggcgcgtattcccatcgacgtgcgtctgggccgcatggtcatcgaagcggccaaggccggttcaccgaatcttctggcttcggtgctcgtggtggtggcgttcctcagcttgcaggacccccgcgagcgcccggatgacaagcgtgaggaagccgaccgcattcataaccggtatgcggatgaaaccagtgattttcttacggcgttgaatatctgggatcgcgtattccaggcggatggcgatccgagcaacaatgcgttgcgccgtatctgcagaaccgaatatttcagctggctcaggatgcgccagtggaaggatctggtctctcagctcaggcagatgtgcaaggagctgaagttcaaggtcggcgacccgttgccgtcttcccgccccggtttggagattcgtcagctgccattgaatcagcaggccgcgcattcgctgtgctgttcgtgggatacggacggcattcataaatcgatgcttgccggcttgctgtccatgatgggcatgcaggtgatccgagagcccaaggcttccgactttgcgggactcagtggagcggctcgtgcccgcgcgatgaaacgcgcccagaagatgtcgaagaatgactatcaaggtgcgcgcggcactcgtttcgccttgttcccggcctccgccgtagccaagaagaccccttcatgggtgatgagcaccgaactggtggagacctctcgtctgtgggcccggtattcggccgccattgacccggcatgggccgaaccgctggccggccagctaactcgcaccacgtatgcagaaccgcattggtccggctcgcgcggctccgccgtggccaccgcacgcgtcttgctctatggtctgccgattgtgcaggatcgtgccgtgcagtgggggcgcatcaatccgcttgaggcccgtgatttcctgattcgtcaaggcttggtggaaggtgacattcagcagcgcttcagctacgacgaattcgtgggcaggaatcgcgacattcttgaggatgccgccgatgatgccagccgcacccgtcagctggcggacaccgtgtccgacgaggatctgttcgatttttataatgccgtcattcccaatgatgtgacctgtgtggccgatttggcgaaatggtggaagatcgatcacgataagcagccggatttgctggatttcgacccggccaaggtggaacgcctggcatccagcgattcggtcagtttggatgattaccccgaccattggcataccacgggttccgatggccagcctatcgacctgcgcctgagctacgtgtacgacccaaccgacccggccgatggcgtcaccgtgcatgtgccgctcaaggcactctcgcgcattacccccgaccagttcacatggaatgtgccgggcttgttggatgagctgattctggcgatgattaaggcactgcccaagcagctgcgtgtccagttcgtaccggctccggacgccgcacgctcgattcgcgattggattaacgaacattaccccgatttgccgggttccggctcgcagcagaaaccgaatctgccaccggtggatgaggaaggcaccactgttggctggcccgatctggcgcatgtgtttaccaaggcggccatcgctaccgtgggagcgcagattcatcctgaggtgttgggaccggaattggtcgagcgtctgtccccgtatttgcgggttacgttctcagtggagcagcagttgccggccggcaaacatccgcgtggccgccgtcacgcacgcgggccggttaaagtgctgggcaccgccaaagatctgaaggcattgcaacgcgaattcgccgcgcaggcggaggcttcggcccgtcagatggtcaagaaacaggccgaacaggccggcgagcaaggcaagctggtgcaacaggcgaatctgctgcataaggcgggtgccactaccgagtcgagggccacgatgctatggcgtggcgcattggatgcgttgcgcttgccgggcgaacgcatttcgtctcgttggctgggcaccgaagcgttgatgctggctgccgccccctacaagtccaccaaggcgctggtcgaggatctgcagctggccacggtcaagcgtctgctgccgaacgtcgacaagctcacggatgatgaagctctggccaacgcagtgctcgacatacgcgaagtgtatgaggataccgtgtaccaggtggcgcatgatgtcatcggcatcatgaagtcttatgccgacgtggataaggccacttccggcaaggccgatctgcccatgctttcggtgttgcaatctatccgtgaccatatcgccacgcttgtctacccaggttttatcggccgcactcccccggatgcgctgaaatcattgagccgttatctgaaggcggatgtgagccgtctgaacaaggcgaaaaccgataagaaccgtgacgtcaagtgggcatggcaggccgacgaggccaagcaattggtcgataaagcattggcacgggcaaaagccgaaccggctggcccgaagcatgaagcactgacgcagcaggccgagcaggcgcgttggatgcttgaagaattctatgtgtctctctgggctcaggaactcggtaccaaggggccggcatcgctcaaccgcatcaagaaagcgctgtcctagcccttaaatcaccgctgaatatacggacgcagcagtgtagcgatgccagcagcgaataatgcgaatatcgcaccgaccggccccagccaggcgagtccaaggagatcgttgaccagaccgccgaccgccgaaccgatggcgatgccgatgttgaaagacatggagttcagggatgcggccaagttcaccgagcctggatgggactgttaagccacgtccatgtatagcacctgagacgcggaattctgcagatacatgagcatgccgagcaccaccagcaacaacgcgccggccgccggcaccagcgaggcaaaggccagcaggcacaggcagaccgcctgcacacagtaaatcgggcgaatgtgcgtcagcggctccacaccgcgccctttgtcggccaatttgccgccgtacaggttgctccacaaacaggcgcagccataaatcaccaggccaatgctgaggtactgttcgggcacaccgatttcgtctcgcatgatgggagacaggtatgtgtagaagacataggaagccgctgcaccgcacaccacatcaagcacgccgagctgaatacggcggtcgaagaacaagcggaactgccgcaggaagccgattttcgccgggtgtgagttgcgcggcaataccaaggccatcgaaatcatcagtaccgcagtaagcacggaaaccaaataaaacgtgacacgccagccgaaagtattggccacccatgtaccaatcggcacgcccaccacggaggcgatggagaacccggagaacacccaggcgatgaatttggtgcggtacttatccgtggtcacatccggcgcaaaagtcatggaaatggccaccagcgtgccggagacggaggcaatcagcagtctggcgatcaacaacaccggatagttcggagcaagggcacacaggatgttgccgaccaagaacacacccatcaatatcagataggtggcaaaacgagggaatcgtgcggacagtgccgagccaatcggcgtacatggtgcatatacgaaggcgaacagcgccaccagattgcccacggtcacttcggatatcttgagacccgaggcgatatccggcagaatacccaccaccacgaattcgctcatgcccagcataaaactggcgaaaatcaggatagtgaccggaaagttgaagaagcggtcggtacgcgcattggtcacaggtgcgttcgtcatatgtctctctcgcatgctctcggctatgtgggttcagtctgtgtgctcagtcgacgtgattgtttcatctctgctcgtcaaacgattactatcagctccgcgacaacactattcccacctctgcccgctatcagtcgtcaccacacgctatgaaaaccccgccgatgaaccacgcatcgacggggtgcaacagatgtgcaacgcctgcaatcacagcttcggcaggtacttcttcaactcgtaaggagtgacctgctggttgtattccgcccattcctgacgcttattgtccaggaagtagccgaacgcatgctcacccaagacatccgccacgaagtcagaccgctccatgatcttcagcgcttcgtccagcgagctcggcaacggctgaatgcccatggcctgacgttcaccgtcggtaagctcccagacgtcgtcactggtgggctcgcccagctgcatctgcctgtcgatgccgtcgaggccagcagccagcagcaccgagtaggccagatacgggttggccaccgggtcgagcgcgcggaactccatgcgcgcggagttgcccttgccgggcttgtactgcgggatgcgcagcagtgcggaacggttgttgtggccccagcaaatgtagctcggagcctcgttgccgccccacaggcgcttgtacgagttgacgtattggtcggtgaccgcgcagatttcggccgcatggtacaggatgccagcggcgaactggcgggcggtcagggacatgttgaattcctgaccggcctcgtagaaggcgttggagtcgccctcgaacaagctcaggtgagtgtgcatgccggaaccaggcgcgtcggccaaaggcttgggcatgaagctggcatggatgccgcgctccagcgaaatctccttgaccaccgtacggaacgtcatgatgttgtcggcagtggtgagcgcatccgcataacgcaaatcgatctcgttctggccaggacccgcctcatggtgcgagtattccaccgagatgcccatctgttcgagcatgttcacggtggcgcggcggaagtccatgcccgggctgcgcggcacgtgatcgaagtagccgccttcatcaatcggggtcggcgccttggaccaatcatcctggctttcgaacagataaaactcaatctcagggtgcacgtagaacgtgaaacccttatccttggccttggcaagcgcacgcttcaacacgtggcgaggatcgccgagcgacggctcgccgtccggggtcagaatgtcgcagaacatgcgagcggtaccttgcggaccgccgcgccatggcagaatctgaaaggttgaggggtcgggttgaacgatcatgtcgtcttcggacacacgggtcatgccctcgatggcggaaccgtcgaagccaagaccctcctcaaatgcggcttccagttcggccggagcaatcgccacggatttcagtgttcccaacacatccgtgaaccagagacgaatgaagcgcacgtcgcgttcttcgaccgtgcgcagcgcaaactcctgctgtctatccataatcgcttatcgttccatatccgtgttacgaggggcgttaacatctcaccggtgtgccgtgttacatgattcggcggcgaagccgcgctaaggtgtggttcatgagcgaagaccatctcaccccatccgccaatccacctgtcgatgtaaccagctggaagcaggccaccgatccgcgcgaccggtcacgtgccggcatatccactcgagccaaggcgccattggattcccatgccatttggcaggcgcaggagggccggagagaggcgatcagccttttggaggagcagtccgccatccgcgtgcccgaactggttccgttgcgatacaagcgtatgagcgccagcccgttcacgttctatcgcggcacagtgctcatcatgaccaacgatctggcaaccacgccggtaaccgggataccggtgcagtgtgtaggcgacgcgcatatcggtaattttggtatcttccgctccccttccgcacgactggtattcgacatcaacgatttcgacgaaaccgcggtgggtccctgggaatgggatttgaagcgacttgcggcctcggtggaaatatgtggccgcgccaacaaaatcaaggagaaggatcgccgcgccgccgtggtgcaatgcgtgcgcacctaccgtacccgcatgaagtggttctccgagatggattatctcgatgcttggtacgagcacctcgatgtggaggaaacgctggatcgttttgaaaccaccggttccaagcgcagtcgcgtattgcgcgaagccgccatgaaggcgttgctgaaagacaacgacgcggcagcagccaagctctgcaaattcgagaacggcaagctgcggttcagatcgaatccgcctgaactggtgcccatcaatcaacttgacgattatgccgacctggatgcattgcaggcgcgtctcgatgcattgatcgaaagctatcgtcattccctctacgatgatcgacgctgggtgttcgaccatctgcgctatcaggatgccgcccgcaaagtggtgggcgtcggctcggtcggacaacgtgcatgggcctcggtatggatcgcacgcgacgctgatgatccgatgatgctgcagatgaaggaagccacatattccgtgctggagcactattgcggagcctcgccctatgccacgcacggcgagcgcgtggtgcagggtcagaagctgattcagaatacggcggacgtgctgctgggttggtcaagctttatggccgaggatggacgcaagcgcgattattatgtgcgtcagctgtggaacggcaagggctccatcgacatcgacaatctcaatgcctcaggtttaagcgatctctcacgcatgtgtgcatggtcattggcgcacgctcatgcccgcaccggcgattcgatcgccattgccaactacatgggcggtaccgacgaattcgaccagtccattgcctcgtttgctgtaagttacgccgagcagaacgatgaggattacgccatattcaagaaactcatcaagtccggcgaactcccctgcgcctgatacaaagtaacggttgttgctgggctcgttgcagtcatctttgacgccaatgggctcgccgtccgttcggtatattctctagcgcaaataattctcgtagaaaacggtcatttcgagaattgtttgcactaactcaagctcagtgcaaataattctcgaaataagcattttgttcgagaaatctttgcactggcaacgactcagcgcaagaaattctcgcaatcaaggtttatttcgagaatttcttgcgctgagaaaacaccaacgtttgtcagtgccaaatcacacatcatcgagcgacttcgagcgcttcctgaagcgtgaaggcacgcgcgtagagggacttgccgaggatggcggaatctacgccaatctcggccagagtcttgatggcacgcaggtcatcaagcttggaaataccgccggaagcggtgaccttggcatcggtgcgttcagccacttcacgcagcagtccgatgttcggcccggacatcatgccgtccttggccacatcagtgaccacgtatcgcgagcagccgaccgagtcgaggaacttcatggtctcgaacaggtcaccgccctccttggtccagccacgagccgcaagcgtatgcccacgcacgtcaagaccaacggccacccgatcgccatacttcttgatgaccgaagcggtccaatcagggttctccaaggccgcggtgccgatgttcacacgcgcagcaccggcctccaatgcagcatccagcgaatcatcatcacgaacgccaccggacaattcgatattgacccggtcaccaagttcgtgaacgatttcacgcaactgatcgcggttgttgcccgtgccaaatgcggcatcgagatccaccagatgaatccattcggctccggcctctacccatgtgcgtgccgcctcgaacggcgaaccgtaatccgtttcagaaccggattcaccctggcgcaggcgcacggccttgccatcgcgcacatcaacagcggggagaagagtcaacgacatcagagaacaacctttcttatgaactacagcgtggcaatccagtttttcagcaactgagcaccggcatcaccggacttttcaggatggaattgcgtggcagatagcggaccacgctcataagccgccacaaaacgcgaacgtccgtatgtgcaccagctcactcgttcagtggaagtctgcagatcaatgtcaaaacgcgcggtgtcggcgggcttgacctccattgcggcataggaatgcacgaaatagaagcgctcgttttccacaccgttgagcagcacggaatcgggagcggcctcaatggtgtcccagcccatatgcggcaccacatcggcatccagcagattcaccgagccaccgatcagaccaataccggaggcatgagcaccatgttccagaccacgttcaaacataatctgttcgcccacacacacgcccaataccggacggccagcacggatacggtcatagatcacgcggtcgccatcgacttttttgagaccgtccatgcaggcggcaaacgcgcccacacccggaacgaccagaccgtcggcttccaaagcctgacggtaatcggaggtaagtgtggtatcgacgccaaggtcggcaagagcacgcaccatggatcgtacgttgccaaagccataatcgaaaacaaccgctgtggtcatagtctgtcctaacctgttctattcctacgcctattcgatatgcgatccgcggccaccacgcccacgcttggtgtggtcggcgagaatctgcatggcctggtcatgatcgaggtcggccgactccaccacttcaaaaccttgggttctgagctgattcaacgagacgatgccgagcataagatcctccacaaatcgcggagtggacgaaaacagcaccggcggagcaaaggtctggccaacctgcccctgcatgatcatggacacttcgagcttgtccgcacgattgaccgccaaaatcaccaccatgccggaaaccacggtggtcagatctttggcggccgcctccggagcgtccccatcaagattcttcagcactgccaccgcaccctgattggcaccgatgcatgcagcggagatgtccgaaagctggcagaatgcggccagaagatccgccgaagcaatacgggtaacgattaacgccatcttggccttgtcaccaagaaggccagccagctcattatcgaatccggccgagggatccaccacatcggccatggcttcgttgacggcatccgccacagaactagagatatcatctgcggcttgtgtatcagcgccgttatcaatcgacttggcatccgccgcagaatcggcttgatcgtcgtcccccgtatccgtgtcgttctcgaattccttctcgaatccggccagtgcagcctccagctcctcgtcggagaaatgcgtatcgtccggattgaaatccttatcgtcggacatcacagggctcccttggtgctgggcacaccatccacacggggatcaatttccatggcaaagcgaagcgcacgggccaaggccttgaattcagcttcagcgacatggtgcggatcgcggccggcgagtacctgcatgtgcaggcaaatgccagcgtgaaacgcgatggattccatgacgtgacgaaccagcgagccagtgaagtggccaccgatcatgcagaattcgtagccttcgggctcgccactgcacacgcagtacgggcggccggagatatcgaccacggctttggccaaggcctcgtccaacggcacggtggcatcggcaaaacgacgaatgcccttcttgtctcccagcgcctgcttcagggcctcaccgaacacgatggcggtgtcttccacagtgtggtgcacatcgatatcggtatcgccatgcgcatggatggttaggtcaatcagcgaatgcttgcccagcgcggtcatcatatggttgtagaacggcacggaggtatcgatatcggttttaccggtaccgtcgagattcagctcgaggtcgatgtgcgattcgctggtctcacgaacaatatgtgcggttcttgccatcatgtctcctggttgataggtgtcgcatcatgccgccgcaatcgatgatggtcacggcagcatgatgtacgagtctcttatgctgcttctactatacgaagcacttcggcaagggcattacggaacgtttccatttcctcgtcagtgcccatgcatacgcgcagccagccgtctggcccgaccacacgaatcagtacaccacgcttgagcaattcgtcaaaaatcgcctcacggttgtcgaaatgcccgccgaaaagcaggaagttcgagccggattcggccacctcaagcggctgccccttataggtctgctctttaagccaggaagcagttgcctcgcgagtctcgcgcaggtgttccactcggctcagctgctcgtcggtgtgctcaaacgcagccagtgcggcggcctgggtcacggcggacagatggtatggcatacgcacgatgcgcacgcagtcgataatgcctttggacgcagccaagtaaccgactcgtgcaccggcgaaagcgaaagccttgctcatggtgcggctgacggccagattcgggtggttcttgataaggcttaccgcgctcggggtgccgggcttgcggaattccacgtaggcttcgtcgatgacgaggatcgggtggacgccctcacccgcgccagccacttcagcggtttcgcaggcggcaagaacgcgctcgatgtcttccatcggcagaggggtgccggtcgggttattcgggctggtgagcaacaccatcgaaggcttgacctcgttgatggcttcaagcaccttgtctacgttcaacgtaaagtcggcgttgcggtgagccagcttccaaccggtgaaggtgtcgcgggcgtattccgggtacatggagtacgtcgggtcagcgccgagagcggtccttcccgggccgccgaaggcctggaacagctgcagcataatctcgttggaaccattcgcaccccacagctcgtccacatccagacgggcgccggattcacgggccagataatcgctgaacgcctgacgcagctcaatatgttcacgatccgggtaacggttcagcgtcggcgcaatctcacgtacacgcttggcaatggtatcgcatacagccggatccgatgcatatggattctcattgacgttaagacataccgggacatcaagctgaggagcaccatacggttcctcaccaatcaaatcattgcgcagcggcaggtttgcgggaatcgagctcatcgcagaccggcttctttctcctgctcgcgcagggtggccttgtcatagggatccttgacgaaacggctcagcacgcactcaccgtgagccggcaggtcttcggaaacggcaaaggcattgatacgggcagccagtgctttgaggccttcctcgtcatattcgatgacttcgacaggcttcatgaaggtgtgcacgccaaggcctgcagcaaagcgagcggtaccgccggtgggcagcacgtggttggagccggacatgtaatcgcccagcggcaccggagagtacgggccacggaaaatggcaccagcgttcttgatacgcttgaccacggcatcggcatcctcggtctgaatctcaaggtgctcggcggcataagcgttggccgcatcgatggactggtcgaggttgtcggtcagcacgatggcggactgggtgccgctcagggacgtgtggacgcgctcggcgtgctcggtcttcggcacacggtagttgaggttctcctgcaccttctcagcaatatcggtggagtcggtgaacagcacggaaccggcaagctcatcatgctcggcctgtccgatgaggtcggcggccagcaggctcggattagcggtcttatcagcgatgatgccgatttcagtcggaccggcaaccgcatcgatgcctacgaatgcggaaacaagagacttggcggtggccacgaagatgttgcccgggccggtgatcttgtcgaccgggtcgcacaatacgtcgccatcctgaggctcgctgcccttggcgccgtacgcgaacatggcgatggcctgggcgccaccgaccgcgtatacctcatcaacaccgaggatggcgcaggtggcaaggatggtcttgttcggcaggccctcctcgttatcgcgagcgggcggagtggcaatggccagcgattcgacgccagcggcctgagccggcacggcattcatgatcacggaagacgggtacacagccttgccaccaggcacatacaggccgacgcgctgaatcggaatccaacgttcggcaacacgagcgccctcggccaagtcggtgtagaagtccttcggcacctgattggcagccacagcacgggcacgacgcacagattcctcaatggcggcgcgcacttcggaatcaagtgtggccagggcatcctgaatcgcttcgaccggcacacgcaggtgcttcgggcgcacatggtcgaacttctcctcgaagtcacgaagagcggcagctccgcgctccttcacatcgtccagaatcggacgcaccaagtcggtggcttcggaagtgcccattgcggcgcgcggcatcgcagcaagcagttcggcacgggacagtttgcgaccacgaaggtcaataatgcgcatgatattctcactcataatgtcccatcgtagcaacgtacggagtctaaccgccgaggaacgcccatgttcacccgtatcgtgagattatcggaacgctatgagctactcgagaacgcgaaacgcggacggtgcatcgtctttgaccggcacatcctgtatgtcgatatggcgtacatcggaccaccgcgggcctagtttcagctgcttcaccagcgcctgcaccgactcctgactgccttgggcctccacttcaactgatccgtcgtatcggttacgcacccagccgctgacgccaagttgacgggcctgtatgaccgtgaaataacgaaagcccacaccttgcaccagtccggtaatcaccatgtgtttgcgcaccacatccgaggcttgctcttgcaacgaatggttctttgaccaatgattcatcagcttccccgttcagttcgataaccgttatgccgggcgtagaatctcagcacagccacgcatttcctcatacaataaaatatggcaaagcatagctatcggcaaagaggaactatggcaattcaatcgacaatcacactgaacaacggcacggttattccacaggtgggcttgggcgtattccagacgccggatggcgataccacggtgaatgcggtgcagactgcattggagaacggttatcgtcatattgacacggcgatgatctatcgtaatgaggcttcagtgggcgaaggcatccgtcgtgccggattgcctcgtggcgacttcttcgtgactaccaagctctggaatgacgatattcgcgcccatcgcggcaaggatgcatttcaggaaagcctggatcgccttgggctagattatgtggacttgtatctgattcattggccggccgatggatggcaacaagcgtgggacgacctgcaggagatttatgcctccggccgagcgaaagccatcggtgtcagcaacttccagaagcaccatatcgatgagttgcttgccaacagcgacgtgctacccgccgtagatcagattgagtcctccccgcagttcaccaatcatgagttgattggacagctacgttccaagggcattgtcgctgaggcatggagcccgctcggtggtaccggaggcaatctgctgggcagcccggttcttgctgaaataggcgccaagtatggcaagtccgcagctcaggtggtgatccgttggcacatccaacgcggcgtcgtcgtattgccgaagtccactcatgtcgaacgcatcaagcagaacttcgatgttttcgatttcaacctgacgtctgaggatatgacagccattaccgcactcaacaccggcaaacgcaacggtgcggatccggataatttcgatttctgatccatacgctgcacaatacgcaaaaagggaattctctatgacgaggaatccccttttccatcaaaaaaagattgcggaccgtcctcccctattaggaaagacggtccgcaacatttcgtaacggatataacgcaatacgttaacgccggatggatcccttgaatggcttatccggagatagcgcgacacgtcccatatcagtccccagaacgttcagcgtaatctccgtgggcttcgaacagcgcaacgtatattccactgtctgatccgtccatgtcgcatccacttggattccgcctcttgcgcggagcgcatggaaggttccctcatgccaatcctccggcagggccggaagaatgcgaatccagccatcgtggctttggacaagcatctccgacaaagccgccgggaatccaaggttcccgtcaatctggaacggcgggtgggcgcataatccgctgccgtacacgcctccgcccagcagattggtttcagcgttcgcatccaccggccgcaggaacatgcctatgattcgtttggcatgttccgcatcacgcagacgcgcccacatgatcatgcgccatacgatgctccaaccggaaccatcgtcgccgcgcacttcgagggatttcctagcggcttcctccaggtgcggagtctgagacgtgatgcctgcaccaggatgcagttcgtaaaggtgggacagatggcggtgctgtggatcggattcgatgaattcgtcgttccattcgaggattcttccatcagctcccaatcgcgtttcagccagttgggaacggacggattccgcttcatggaccagatctctgtcctcttcgtcaaggtcttccaaatcgtgggaagcctgaattaaatcatcaagcagattacgcacgatggccgtggcattctcactgctttgtgcaacggataccggttctccgttcaccaagaaacagttctccggtgatgttgcaggggacggggccagtccatgctttgtctccgataggaaatccatgcagaatcgcgcgttgtcccgcatgatcggccagatgcgggccaggtacgatgcatcctggttgaacaaatattcatcgaacaggttccggcacatccatgcctgaccgaacggccagaacgaccacatcggctcgccgttcgcaggaagggccctgcgccagagatcgacattatggaagaccgccgatcctcggcagccaagaatcctgtcagcggcgtcgtgccccggcactagcagctcctcattcatggagacgagcggctcgatgagttcttggagggcgcatgggcctgtcatccaatagttcatctcgacgttgatgttcgttgtgtaggcgctgtaccagttcgggaaatccttatggttccaaatcccctgcagattcgctggctgggtgtgcggtctggacgaggaaataagcagataccggccgaaatcgaacattgcctccgccagcatctccagacgatgcggttctttgttctcatccgagcgaaggatcgccgagaacggtagttccgtatcgtcatcatgagctgaaccgagatggatggccaccctgtcgaaatatctgcggtagtccgcgatgtggcggtcgagcatggtccgcaagtcggtcgaccactcgtcgatggttttctccagatggtcggcgataaccgtcatgcttcgttccggctgctggtcgcttcccctgaatccgctcatactgcggaagcggagcgataatccggtgatgttcgaacattgcagactgttgtcacccacattgacgtcaccacctgtgacggtaagggagaacgcaccggcgtacgccattccagttccgtcctgctcatcttcccaaggattttcagaaggatgagggaggagcccgatgttgagtccaggcatccggcccatgacgacgagtgtggcccgatgaccatcggatactgtttccatcgaggcgcgtgattgcttgaggaaagtgccggagacactgatgttcacatcaatcggcgcatccgatgacatcctgtagaccaacagatcatcgggctcgctgcaccatgcgtcgacatgaacgttggcatcacccatccggaacgtttcgccggcgagcgcccttgcaagatccagctggcgtttcatgctctcacggccgtctgcagaggtcgagtactgaatacgggccgttccgaatggctcgtaaatctgctcgtctttttcctgcagtgtggcatccttgatgattcgcgtggcggcgttgtagtcgtcctgcaacgacgcctggcgtgccttggccacaatctccggcgtcaccggcgaggtttccgcgtgtggatatcctgaccaaagggtgtcgtcgttgagatacagcacgtcggtttccggttcggagcacaggaccgctcccatgcgtccattgccgagaggaatgctttcttcccagcacgaagagattccatcgaatgtgagtttcatgcgtaaagtctccttggcagatttgcttatttgagaatgctctggatattgcggtactgttcgtcggtcagctgcacggcgggttcatggatggacgtgtcgattggcagtcccttcgccttgaccgcgcccttgatggcgctgatgaacaggtcggcagtgtcgtacaggcgcatcagataggaaatgcgttcagccgatttgatggccgtggcgtaatcaccggactgccatgcatgatgcaggctgacgaaagtctccggctctacattggtcaatccgcacagcacgccattgccgccgctgattcggttgacggtgtagtactcgtcgaatccggacagcacgctgaacgatggattcaccttacgaacggcagcaatgaccttcctggtgtggctgatggtgtcgacggtgtctttgatgccgacgatgttctggttctccgctgcgagatccgccaccagctcgggtgtgaggtcgttgcccgtcctggctgggaagttgtaaagaatgaccggcagcgtcgtcgccttggccaccgcagagaagtagcgcttcgcgcaatccggggatggtccgaaatagtacggggatactgcaaccaatgcatcggctccggctgcttcgctttccgccgccaatgttctcacattgtctaggttggtgtctcccactccgacgagcaccttcatgcgtccggcgactttcgaaactgcgaaacgcaccgcttccgccttcgtcttgacgtcgatggcgtagaattctccgatgctgccgaacagcagcacaccgtcgatgcccgcgtcgatgagatgatcaaggtgcttgccccaattgtcgtagtcaatggtcccatccgcgttcgtgatggtgatggaggggcagaacacgccttcgaattggacgttgcaagtcatgatattttcctttcgacgatatggtaggcgttccgcgcgttattgaagaagaagtcgtcgtctcccgcgaaacggttgagcaggattgacagatgactgtcgaaatcggcgtatagaccaacgacaggccaattcgacgcgtacagcaaccgcttgttcgagaacgcggcttgtgcgagatcgagcagggctgagacgaatcgtaggtcatcggttggataccccgataccttgacgtacacgtttggcagctctccgagcctatgcagggcatcggacgaggattcaaggttttggagatcgaatatgttgcccatatggtcaacgatgacggtcgcttcgggcacctgctcgcaaacctgagcaagatcgccaagctcatccacccgtacgcatgcgtcgaatggcatgttcttatcggccataagccgtaaaccgcggatgaagttatcttgcaggcaccgtccccgcggcgacgccggcgtatgcaatggctcacgaacgccatgcgcgtacagcggcatgcgcatggccggtccgacggtggaccgcatagatgttgccaacagcagaggatcatggttttcggacagcagccggtcttccaatgacgtatcgtccgtgtcgacttccacatacacaccgccgatgaaattgaccgcagcgtctgggtggtgctcattgtatgaggcataggcgcgtttgaggcagtccatgtcgtaacggcgggtgatggacccatccgtaccgtcgagccatgaaagcggttggacggatgggtcccagatatggaaatgcgagtcgatgatcctctgcatgtcgcgcgtcctagtcgagtgccctgtcgaggtggacgtatccgccgtcggggaagacccattgtccggtggtgtgcgaagacctgtcagacagaaggaaagccacggtgtccgcgatttccgaagtctcggtcatgcggtggccgagaggaatcctgtcggtgatcttcgccaactgctcgcgctgcgcctgttcgtcgccgaacgtcttgatccattgcgcgtacagcggtgtccgcgcttcggccacgacgacggcattgacccggacctcgtccggggcgagggcggcggcccactcgcgggtcaaacccagaatcgcgcctttcgccgcagcgtaggcgctggtcttgccctgaccggtcaatgcggtcttggaaccgatattgaccaccgagcccttgctggccttgagcgctggcccgcgctgatgaaccagctcgtaatagtgggtcagattgccgtgaagagactcctcgaactgacgccatgacgtggtctcgagcgcgagattgtcgtttcttccggcgttgttgaccacaccatcgatatggccgtatttcttcatgaccgattcaacgatgggggcgatctcgtcggtgttgttcaggtcgatcagataggtgtcatacgaatcggtgacctgttcgatatcctgtcggaattcgtcgtcggcaccatccgaacgattcagcaccaccggaatggcgccttcttcggccagtcgcagcgttatgcccttgccgatgcctttgaagcctccggtgacaataatcaccttgttcttaagatgcaggtccatctcaggtccttccgactagtccttgtgcaggtacttcatgcattcgtcgagcttcatctccgtgccgttgcccggagcgagcggcgcaacgtatcgtccgttcttgatgacggtcggatgtacgaagtactcatgctggttgtccacgtattcgacgacgcgatcctccatctcgccagagacggacacataatcgaacatcgcaagctggctgatggcttcgcacaggccgacaccacccgcgtgagggcagaccttgacgccgaacttcttggcgagcaggtattcgaggacgatttcctgggggccggcgactcgtgtcgcgtcaatctgcatgaccttgaagctgccagcctgcaggtactgcttgtacatgactcggttctgcatctgttcgccggtggccaccggaatcggatcgatggccttctggattgcggcatggccaagaacatcatccgggcaggtcggttcctcaacccacgcgagatcgtagtcattgaatttgccgatccattcaatggcctgcggcacatcccagacctggttggcgtctacggcaatggcgatgtccggaccgaccgcttcacgggcaagcttgagcctgcgcaggtcgtcttcgaggttttgaccgaccttaagcttgatctgcttaaagcccatgacctcggtctcttgcttggccaagcgaaccatcttctcgtcggaatagccgagccatccggcggcggttgaatatcccgggtagccgacttccttgaggtgggcgatgcgttccgccttgccttcctgggcggcacgcagaatctcgagggcttcctgcggagtgagggcatcagtcaggtagcggaagtcgagagtcgcaacgagctcttcgggctccatctcggaaaagaactcgccatcgcaggtggcgcagtaggccacaccgcgaccagagtattcggactccccttcaaaccctagtttgcgtgggttggcaccggtagcgatgaaaatttcgttatacttcctgctattcccctcatgtgattgcggagcaagacaggttttagatttgcgattatgcggcaaaggattgcagatatgagaagaccccgggagccgtcaggctcgaccggggtcctcatattttaaattgggtgcggcggcgtgctactctcccacaccctgtcgggtgcagtaccatcgccgtgccaggccttagcttccgggttcggaatgggaccgggcgtctcacctgggccatggccgccgcaaatcttctcttgtacggtcagacgctggggtctgccggcttggtggcggcctgggaaccggatggcggacgcgatgcgttggttcgtcttgtgttcatcccgtgctcattgtcgtgcgggatggttcgcagcaggatgcttgcgttccaaccggggttggattgttgtgttgcctttcgtccgttagtaccggtcggctccacccctcgcggggcttccacgtccggcctatcaaccacgtgttctgcatggggacttcaaggacccgtagtcctatggaatgcttatcttggagcaggcttcccgcttagatgctttcagcggttatcccttccgaacgtagccaaccggccgtgccactggcgtgacaaccggcataccagaggttcgtccacccaggtcctctcgtactatgggcaggcctcctcaacattccgacgagcgcagaggatagagaccaaactgtctcacgacgttctgaacccagctcgcgtgccgctttaatcggcgaacagccgaacccttgggacctgctccagccccaggatgcgacgagccgacatcgaggtgccaaaccatcccgtcgatatggactcttgggaatgatcagcctgttatccccggggtaccttttatccgttgagcgatgccgcgtccgtacaccggcaccggatcactagttccgactttcgtccctgctcgacccgtcagtctcgcagtcaagctcccttgtgcacttacactcgccacccgattgccaaccgggctgagggaacctttgagcgcctccgttactctttgggaggcaaccgccccagttaaactacccgccaggcactgtccctgaccaggatgactggtcgaggttagacatccaatgcgaacagagcggtatttcaccttgcggctccaccgcggctggcgccgtggcttcgaagccttccgcctatgctacacaatccacaccgaatgccaataccaaggtatagtaaaggtcccggggtcttttcgtccttctgcgcttaacgagcatctttactcgtactgcaatttcgccgagctcctggtcgagacagtggggaagtcgttacgccattcgtgcaggtcggaacttacccgacaaggaatttcgctaccttaggatggttatagttaccaccgccgtttaccggggcttgaattcaccgcttcggccgaggcctgacggatcctcttaaccttccggcaccgggcaggcgtcagagcgtatacagcggcttgcgccttcgcacgctcctgtgtttttggtaaacagtcgctaccccctggtctgtgccacccccaaaagctccgcgggcaagccgcttcaccatcgggggtctcccttaaaccgaaggaacgggagtgatttgccgagttccttgaccaggattcgctcgatcgctttggtattctctacctgaccaccagtgtcggtttggggtacgggcggcatgccgcctcacgccgaagcttttctcggcagccgggatcaccggatatcgcgcccaacggcgcccatcatcgcacctcgcccacgcgccccacggatttgcctgtgggacgggctgcgtgcttgaccacggaagaccacctccgcggccggctacccttctgcgtcactcccgcgctgacctactaccgttacggtcccaacaggccagggcatccggctcccgaaggagacgtaagcccggacccggaggttagtactcgcggattcggttttgccggttgcatgccggtacgggaatatcgacccgttcgtccattcgactacgcctgtcggcctcgccttaggacccgactcacccagggacgatgaacgtggccctggaacccttggtcgtccagcggacgggatcttcacccgtctttcgctactcatgtctgcattctcactcccatgcggtccacggccggcttgcgccgccgcttcgccccgcacgggacgctctcctacccagtagcaaagctactgccgcgtcttcggtggtgtgcttgagccccgctacattgtcggcgcggaaccactagaccagtgagctgttacgcactctttcaagggtggctgcttctgagccaacctcctggctgtctatgcgactccacatcctttcccacttagcacacgcttggggaccttagacgacgatctgggctgtttccctttcgacgacggagcttatcccccgccgactcactgccgggatacgcatcacgggtattcggagtttggttgctgttggtacccgatatgggcccgcaagcatccagtcgctctaccccccggatgtaatcgatccgacgctgcacctaaatgcatttcggagagaaccagctatcacggaatttgattggcctttcacccctagccccaagtcatccccccggttttcaacccaggtgggttcggtcctccacacggtcttacccgcgcttcaacctgctcagggctagatcatcccgcttcgggtccaggacacgcgactcaaacgccttttaagactcgccttcgctacgcatacgccacacggcttatgctcgccacatgccactgactcgcagactcatttttcgataggcacgccgtcaccccacaagagggccccgacggttcgtaggcgcatggtttcagagactgtttcactcccctcccggggtacttttcacctttccctcacggtactcgttcgctatcggtcagacaggaatatttaggcttatcccacggtcgggacagattcgcacgggattccacggggcccgtgctacttgggagacgcgatcgccagaccatgcgcgttcgggtacggggccctcaccctctgcggcccggtattcaacccggttcccctggcacatggttttatgcaactgacggccggcccgtcggagccggcaaacgcgatccctctacaccccgcgcgcaacccccgacgggtatcacacgcgcaaggtttggcctgatccgctttcgctcgccactactcacggaatatcctttcctgcaggtactgagatgtttcacttccctgcgtaccccccgcacacggcggtaccggcccatgacggccggtgggttcccccattcggaaatcctcggatcaaagccctgttggcggctccccgaggcatatcgcagcctcaaacgtccttcatcggtcctgtctgccaaggcatccaccatacgcccttgcaggcaacacgcaccacacggtgcgcatggccgcaaggatccttcctagcaaattcccagacgacaaatcatcacactaaaatgatcacaaaacgatcgaaacaaacactaaaaatagagttcgattcgaaatcaacagcaagaacaaagaatcaaaagaaacttcgtcttgctcgcgtccactatccagttctcaagccaccacgcaccaccacgccgtccggacgggaccagcccgccatcagacacgatgggcatcgaatcgcgccaggccaaagcctggggtggcgatccgggagcccaaaagcgcatccgcaccactcccgcggaacatcccacgacggacgaaccgaaagcccatgatctcttccacaccagcagccccaggccgccgcgactgccgcggcgtcggggttcgcaccgccggacgaacatccggccgtattctccgtagaaaggaggtgatccagccgcaccttccggtacggctaccttgttacgacttagtcccaatcacgagcctcaccttagacggctccctcccgcaaggggttaggccaccggcttcgggtgctgcccactttcatgacttgacgggcggtgtgtacaaggcccgggaacgcattcaccgcgacgttgctgattcgcgattactagcgactccgccttcacgcagtcgagttgcagactgcgatccgaactgagaccggttttcagggatccgctccagctcgcactgtcgcatcccgttgtaccggccattgtagcatgcgtgaagccctggacgtaaggggcatgatgatctgacgtcatccccaccttcctccgagttaaccccggcggtcccccgtgagttcccggcataatccgctggcaacacggggcgagggttgcgctcgttgcgggacttaacccaacatctcacgacacgagctgacgacgaccatgcaccacctgtgaacccgccccgaagggaaaccgtatctctacggtcgtcgggaacatgtcaagcccaggtaaggttcttcgcgttgcatcgaattaatccgcatgctccgccgcttgtgcgggcccccgtcaatttctttgagttttagccttgcggccgtactccccaggcgggatgcttaacgcgttagctccgacacggaacccgtggaacgggccccacatccagcatccaccgtttacggcgtggactaccagggtatctaatcctgttcgctccccacgctttcgctcctcagcgtcagtaacggcccagagacctgccttcgccattggtgttcttcccgatatctacacattccaccgttacaccgggaattccagtctcccctaccgcactcaagcccgcccgtacccggcgcggatccaccgttaagcgatggactttcacaccggacgcgacgaaccgcctacgagccctttacgcccaataattccggataacgcttgcaccctacgtattaccgcggctgctggcacgtagttagccggtgcttattcgaaaggtacactcaacacaaaaatgccttgctccctaacaaaagaggtttacaacccgaaggcctccatccctcacgcggcgtcgctgcatcaggcttgcgcccattgtgcaatattccccactgctgcctcccgtaggagtctgggccgtatctcagtcccaatgtggccggtcgccctctcaggccggctacccgtcgaagccatggtgggccgttaccccgccatcaagctgataggacgcgaccccatcccatgccgcaaaggctttcccaacacaccatgcggtgtgatggagcatccggcattaccacccgtttccaggagctattccggtgcatggggcaggtcggtcacgcattactcacccgttcgccactctcaccaggcagcaagctgcctggatcccgttcgacttgcatgtgttaagcacgccgccagcgttcatcctgagccagaatcgaaccctccacaaaaaaccttcatgaaaagcatccgaacagatgactcacaaaacaaaaatcgacgagcacgtccttaaggaaggacgccctcaaaaaaacctcacccctcatcaaaccctcccgggtacccaaccaccacacaagcggccaggcgaggaatgaactggcaatcattgactataaagaagtagtacaaacacgctcttgagttctcaaaccaccaccacaccagcacacgaaatcccgcatcttctctaggaagggaaccccgttgcgctgagcggcaacaggtgaataacttacacgagcacatggattcatgcaaatcgggcataacaaaacacgccgcaatcgttgcaacgacggcgttctatcggcgtgtcgaaaatggcttacatcacacctttaccatcacaatacgccagcttttctctgcataatggagcgaaatcaaaagttcatcggcgtgtcgtaatagttcattccatgttcaattctccacagcccgattatgcgaacggctccctcccgcacagggcggaacgggagccgaatcaattcagatcacatggtattcgcgtagcagggtggcaatatccgtgccatcgagcttcttaagcaccttcttgaccacggccttttcaatgaagttgagcttcatatccgtcaccggtgcgccgtcgcgcagtttgacggtggcgttgagcaggttgcgtacgtcatagacgctgccccacacttcaggcacgccacgatccactccgagcagcgtatagacggcttccataccggtacgcatcgaatattcggtggtgaagatcgtatcgcgtggggtttcggcgaactggccgaggaatgcgaagttcacggcgccatcgggcaccacgtccgggcggtcgccggctgcgcgaggcatgaagaatgcagtgatgtatggcatcatcaccggcacggtattggcatgatgtttggcaagcgactcgatcttgtcggtcggtacgcccatgtggtagagccactcctcacagatctcctcgccggtgcattcggtcatcggcttcttcacatagttgcccggcttgtccgggaacaggccatagacccatacgcacagctgatccttgggctgatcgcggaactgctgttgacgattgagcgtccagctcatcagccagttagaatcctgcacagtgacgatgccgccggtgacgaccttgccggagaacggatcgcgcttgcatatcttctgaatatacggaggaatctcatcatccaaagtggtaacagtggcgctcatccacttggtggcgttcgggtcggaacagaacttttccggatgaccgaagctcggatcctgttcggcgatacgcctccacatatcccagccgccgcctggcttcagatccggattccatgcggcgggcgaattctgcgaacccatagtggagttctccacgcagccgccgttggtgatgaacaccaaatcgttttccgtcagatcgatagaggacttctccccttcctggctgacatcgatgcgtacggcgagcttcttggtgggggtgctggctggattgcgcttgaagaaaccggaagtggcctggattttctggatggtgtcttgtccgacgccagtatgctcgcgcttggggccgtctcccccaccgatggcgaattcgacgttctcgaccttggtgttgtatcggaattccacgccatgagattccagatatttgaccatgggcagaatcatcgactcgtactggttgtagcgggtgaatcgcagtgcggagaagtccggcaagccgccgatgtgatgaatgtagcgcttgatgtacagcttcatttccaacgctgaatgccaattttcaaaagcgaacatggtacgccagtacagccagaagttggagttcagcacctcgtcatcgaagaaatcggtgatcggcttgtcatacaggtcctcgtccggagtgaagaacagcttcatgatttccatggaagccttgtcagacaatccgaatttgcccttgagtccggcatccttgccgagatctttggtggcgcggcatagcgagtaattcggatcttccttgttgagccaatagtattcgtcgagcacgctgactccctcggtctcgatggagggaatcgaacggaagagatcccacatgacctcgaaatgattgtccatttcgcggccgccgcgcatcacataaccgagaccaggaatatcgagaccatcgcaggctcctcccggtacgggatccttttcgagaatatgaatatgatcgcctggcatctggccgtcacgcaccaggtaacaggccgaagacaaggccgccagaccggtgccgatgatatatgcatgcttgctgtctacgccggctggcttcttcggacgggcaaacgcctcatagttgccgctgctgtagtacatgttccgcctccttggggatgaattgacaatccatcaactcttctgtacagatatcttgtcgcgttattgccggacacgccataggcagtgtccggcgttctgctgcatttgtttgtggattacattaacgggctttgccattgacgttcgccctgcgcattcggcttatgtgacgaatcagatattgccgcgcgagtgctggttggcccaggactgagactgcacgaaggtggcggggtcggcactcacattgcccttcggatcgtgcagggcatcgatggcagcaagttccgtggcagtcaggtcgaaactggcactggccagattggacttcatacgttcgacgtgcttggacttcgggatgatgatgcgaccttcttgcgtatgccaacgcaataccacctgtgcgggcgtgacgttgtgggcctcggccgcagagacaaccggctcggattcgatgtccttgccatgtccgagcgggctatacgcttcaacggcgatgccatgtgccttgcagaaggcgagattatccggctgactgaaacgcgggtgcacttcgatttggttcaccgttggggtttcgccggaatcatcgataacagcctgaagatgctcgggaaggaagttgctgacgccagccacgcggatagcaccttcctcttgcagtttgagtagcgccttccatgtctccttgtagagatcgactgcggggaatggccaatgaatcaggtacatgtcgactacatccacgcccagcttgcgacgggattcctcgaacgcgatgcgtgccggatcatagccttgatcgcagttgcgcaatttggtggtcacccatactttgttggccatgccagtagcgcgtaatgcatcgccgacttgttcctcgttgtagtaagcggctgcagtatcgatgtgacggtaaccgatttccaacgcttcttcgacggcccgctgcgtatcttcgggcggaatctggaatgtgccgaatccgatttgtggaataacagtgtgggccttgttctgcaaggtgattcccggcgattgcaatacctgagtcatatattcctcctcagagcggttcctatgccgacctcattgtaggcatccgcaaccgtttggaaaggaaatgatctgtactattgcgccgaattatcgtgctggatgattgatgagatcgcgttcaatccatgccatgacgagatctgccaaacggttcacttccgcttccgtcagttcacgccctttggatatgtgatgccatttttcgatgcatccccggcagcatgtggcggtggcatgctgggaggtgaatactggatgaccacgccacggtgtttgtttgccatcatttttcggctcggccgcacctacccgctcacgcagcatttcatgcgcatgccgatcgatggtcgctttacctttgacccgagcgtaggcacggtctttgtcggtcagcacgaatttggcacgaaatgccgaatgctgcaaacgcgtcagcgtttcagcaatccactgttgttcatcatcggccgtcatgcctcttaagcttaggcagcggggagacagctgggaccgaagagaatcttgatctcagcaaacagtgaagtatctcgtttgacgcggaaccgatcgccgaatgtcagtacctgcgcattgcctttctcgtccatcaccgccaagtgcacctcgcaatagccgggatggttggtgagcacttgcccgagttgcatcatatgttgacgatccaaagccgcgtgcggcaatgtgatggtcagcgggcgctcgtcctcggattccagagtgggcacctgcagctcggtggcacgcatggaaacggtctcatcgcgcagttccacctggcctcgtatctgcacgatggcatccacggccagctcggcggcagcggcctcgtagaccttaccgaagaacatgcattggatagaactttccatgtcttcaatggtcacaatggcccatgggttgcccttcttggacacacggcgatccacgccggtgattagaccggccaaggtgacctgctgcccctcacccatggtcttggctcgatcgatcagatgtgcaatggacatttcacgcagggaggccagtatcgactgcataccggaaagcgggtggtcggaaacgtagagacccagcatttctcgttcaaagttgagctttgttttcttgtcccattcctcgatatccggcacggtgacagaggcgtcgcccatggcttccgctcccccatcgtccgcatcggagaacaggtcgaactgaccttcggcctgcttacgcttgagactgaccactgaatcaatggcggcctcgtggacagtgaacaatgcgcggcggttcgggtcaatcgaatcgaaggcaccggccttgatcagcgattcgaccagtcgccggttgagcgcggtcagaggcacacgccgaatgaagtccatgaagttcacgaacttgccgcgcggtccttcgcgctcggcaatgatgtcggccactgccttatcgcccacgttacggatggcaccaaggccaaatcggacgacgtctcctactgcggagtacgcgtaaaccgattcattgacatccggggacagcacctggatgcccatgcggcgcgcttcgcccagatacagtgcggtcttgtctttgttggtggcggcaccctgcaacagggcggccatgaactcgaccggatagtgggttttcagataagcggtccaataggaaatcagaccatatgcggcggagtgcgctttattgaaagcgtaaccggagaacggcaccagaatatcccacacggcattcgccgcttcctcggagtatccgtgctccttcatgcctgcaaagaatggcaccttttccttggccaacacttcgggcttcttcttacccatggctcgacgcagcacgtctgccttgcccagcgaatagcctgccaggattcgtgcggcggactgcacctgctcctgatagatgatcagaccataggtctcatcgagcacctgcttgagcggctcctcgagttcggggtgaataggcgtaatcttctgcagaccgttcttacgcttggcgtagttggtgtgcgaatccatactcattgggcccggtcggtacagggcgataagtgcggaaatatcgttgaaattatcaggcttcagcgttttcagcagcgaacgcataccgtcggaatcaagctggaacacacccaaggtgtcgcctcgggccatcagcttgtaggtttccgcatcatcaagcggaatcttggtgtagtcgatagcgggcttgccgttggcttcgatattcttcagggtgtcgtggattaccgtcaagttggacaggccaaggaagtccatcttgaccagacccaacgtttcgcaggtgtggtattcgaaggtggtggtgatggtgccatcggtacgttccagcaatggcgaggtatcggtgatgggtgcgctacccatgatggtggcgcacgcatgcacaccggtctgacgaatcaggccttcgatacctttggcctcctcagtaatgcgcttggcatcggggtcggaatcgtacatctcgcggaattccctggcctcggcatatcgtttggccgaagggtcgaaaatatcatgcaggctgatgtccttgccgccggtggccgccgggggcaaggccttagtgactttttctccaaccgagaattcataacccatgatgcgggcggagtccttcagcgcctgcttggttttgatggtgccgtagatcacgcattgggcaaccttgtcggtgccgtatttttcaccgcagtattcgatgactcgggcacggccttcaggatcgaagtcgacatcgatatccggcaggctcacacgctccgggttcaggaacctctcgaaaatcaggccgtgcttcaacgggtcgagctcggtgatgcccatggaataggcgaccatggcgcctgcagccgaaccacggcccggccccaccatgatgccgtggtccttggcccattggatgtaatcggccacgacgaggaagtaaccgcagaactgcatttggcagatcacaccgcactcataatcggcctgcttgagcacgttcagcggtggattgccgtcataacgcttttcgagtccctcttcgaccttcttcaggaacagcgaggtctcgtcccagccttccggacaggggaactgcggcatgaaagcgccgtcctcgtgatcatcgaacatgacgttgcaacgttcggcaatgagcaacgtattgtcgcaagcgtcgggatgatccttgaacagctcgcgcatctcctcggcggttttgatgtaatagccggtgccgtcgaacttgaatcgatccggatcatccagtcgggagccggagttgatgcacagcatggcatcctgtgcgccggcatcttcggcatgcacataatgggaatcgttggtggccagcagcggggcgtccagcttcttggcaatggtcagcaggtcgtcggtgacctggttctcgattgtcagaccgtgatccatgagttcgataaagaaattgtctttaccgaagatgtcctggaattcaccagcggcacgcaatgcctcgtcgaactgtcccaggcgcagacgagtctggatgatgcccgaagggcatccggaggacgcgatcacacctttggagtaggtggacagcacttctttatccatacgcgggtagcgcataacgcggccttcaagattggccacggacgaggctttgatgaggttgaccaggccttcgtcgttttccgcccacatggtcaggtgggtgatgagaccaccaccggaaacgtcatcacgacgctgagcttcggtgccccagtgcacacgggacttgtcctgacgcgcggtttccggggtcacgtaagcttcgatgccgatgatgggcttgacgccgttggccacacagttggtgtacatctcataggcaccgtgcatgttgccatgatcggtaatgccgactgccggcatctcaagttcggcggctcgcttggccagatccgggatcttcgacgcaccatcaagcaatgaatagtgcgtgtggttgtgcagttgcacgaagttcttcccgtaatcagccatgcgttccaccttaccgtgtggtcttgtcggcggtagatatgtaccggcgagcgtcatagttggccggttttagatacgaccgctccgcagccctctaccttggcattcgggcgaataatcagtcgtacaaacaacatcgtgatgcctcccatcgcgcattccgatacttccatcgtcaagacccgtccttggcaatattgaaagcgactacgcacagtttcccattgagatacaattaccggtagctatctaccgttttttataacgcgtccgattggccaaggagggactattatgagctcatcgccactaaccgcagcaccttccaccgcgcagatcgtcatcgaaatcctcgagctgctggattcccgcacggacagcgagcatgggctgaccgccatcgaaatcagcaaaagcatcggcgtttcggagaagaccgtgcgcggacatctcaaggcattgcatgacatgcagccgttcggacgccgggtggagcatctggagcggcgcgaccttgccaaggcggaaagcgttgaccccaagcccggatggtatatcgagcccgtatttgacacggcccagatgcggctgcttgccgatggcgcggcgctctcgcattcggatggcgaatacttgcaggatcttatcgcgaaaatctacacattcgcgggcaagtcaggccaattgcgcggactcaaccagctggcgacgccgaagaactacaacaccgagttcctcaacaacatcgagctgctcaatgatgccatcgaacacgagcgcgcaattcggttccactactgcacgtacgacatcaatggcaatctggtcccccgccttgacagttccagctcccccaaggaataccgagtcgacccctatcatctgatgtataagaacagcaagtactacctcatttgccacatgcatcagcacgacagcctgtcctatctgcacgtggagcggttccgcggcttgacgatgagcagtaccgatcattcgctcaaacgcacgcttgacagctttagcccggttccgggaacaccattcaacgtcacacaacatatgaacgaacgcccttacccgatgaatgggaaagccgtaccgattcacatgcgcattaagggcacgctcgaaccgttatatgactggttcgaccaggctaccgtcactcaaatcagcgacgccgaatacgacgtgcacattgtggccaacgaacgagccacattatggtgggcattgcaatacgccgattcgcatttcattgagattctcgaaccacagtctttacgcaccatgttgcatgataccggccaatccctgacgcagatgtaccaagaaccatgaggactattcgctaatccaccaacgattcaaccggctcggtatgacgagcgcgcatgacatcaagagcagcagctaagtcagcagggtaatgagactcgaccgtagtccagacgcgcgtgcggggatggcggaattcaagcttcatagcgtgcaaccattggcggtcaagacccagagcctcggacagcaccggattggcaccatacatggggtctccgcataacgggtgaccaatggaagagaaatgcacacgaatctgatgggtacgaccggtctccagattcacggataccaatgtggcctcgtggtcgaaccgctccagtacatcccaatgagtgatggccggctttcctgctggagtgatgcagaatcgaaaatcagagacttttgctcgcccaatcggagcctcgatggtggctttgtcctctttcaacccaccctgcaccagggcatgataggttttcttcacttcatgctccgcgaattgccgacgcatttccgtgtacgccaactcggatttgcataccagcataaggccggaagtccccacgtcaagccgcgagactatgccctcacgtcctgcagcaccataggaagtaatgcgcactccgcggtcgcgcaacgatccgagaaccgtaggcccggaccatccgactgaagcatgggccgctactcccaccggcttatcaactacgacgacatcatcgtcctcatagaccacggccatatcgttcgcgatgggttccggttcgacatgattctcaaccaaatcgaattcgacggtctcccctgccattaaggaactggagcgtgcgacctcgcgtccaagaacgcgagcctgaccggagtcgatcagatcggcggccttggaacgcgatatgccgagcatcttcgcgactgccacatcgaaacgcttgccaatcagtgcatcaggggcggggaccattcggctcattattcggcatctgcctccgaatcggaagacgaatcagcgatgtgcgcggacttctcatccagctctttctgcgagaacggctcaccgatgagaatcagcacgactaggaccacagcggcaacaacaagatagacatccgccacattgccaactgaccagccgtaattcaaaaaatccacgaccttgccgttgaggaagctgtcggcgtacattacacgatcaatcaggttgcccaaggccccggcaaaggcaaaggacagtgccacggtccacttcgtggaaatcgtgcgtatgcccaataccacgagtgccacgcaagccacaatggccagcagactgattacccaggtggcaccggatcccattcccaatgaggcaccaggattgcgaaccagagtcagggaaagcagtccgggaataactcggatggactgtccgtcagacagcgcggccatggcccacgccttggtgagctgatcagcaatcaacgcaaccgcggatacacatgcaaagacggccacgcgggtgcgcagccgtccctgttggttcatcatatgaacttacctacgctcagttggcctgaggctcagactgggtctggctctcgtagttgttcgattcggaaacctgagcggcaagctggccgaggaactcggtaaggcgtgcacggtattcggcctcgaactgcttgaggctctggatgttgccctcgaccaccttggactgagcctgcaggttgtcgcgcacctgctgtgcgtaggtgtcagcggcagaacgagtgttcttgtcgtactcggcagcacggttctgaacttcggactcatactgatcggcatcagcgtgctgggtcttggagtagttatccgcgtcctgacgagtcttggctgaataggagtcggcatcctgatgcgtgttctgcgcgtaggtgtcggcatcagcacgggtcttgtcggagtatgcatccgcctcggagcgcgtacggtcagaataggcatctgcttcggagcgcgtacggtcagaataggtatctgcttcggagcgcgtacggtcagagtagctgttggccttgttcaccagttcgttgtacttgttctggctggcctcggtgatttcctgcgccttggtcttgcccttctccacgtactgatcgtgcagctgcatggccagggtgagcattgcggtggcacgttcgggctcggtgcccggcatggaagctgcgcctgcaatcttctgcagagaaccagtttcggtgctcggctcgaccttggagacctgggaacgaagctggttttcgcgctgcttggcttcctcgagctgacgagtgaggtcggcgatctgagcggcctgctgctcaacggcagcaccctgctgctgggcctcagcaagcttgcgggacagctcctcgttggacgcacggaactgatcgcgctcctgctggatggcggcaatctgctggccaacagccttctggttgccggtagcctgagcggcctgagcggtcagctggtcgatctgagcattgagctgatcgacctgacccttgagctgatcattctgcgcagacagagcacggttggactcctccgcctcgctcagtttggcagcagccagttcggcggcctgagcgtcggactcggcaccgggctgcgcctgtgctgcagcgttcttcagatcggcgttttcggcctgcagcttctgcacctgaccggacagctcggaaatcttagcattcagattgctgacatcaggacccagagactgagtggcctgaccgccggcgactgcctgacgccccagagcctcaaccgtttcggtgacctgatcgaggaagtcatcgacctcgtcaacatcgtagccttccttgaaacgaacggtctggaaggtgtgctccctaatatctttcggcgtcaacagagccataaatcttgcacctcgctttggggcattgcccgcgcttacgttgctatcaaatcaaaatgctatcacgacctcatcgtttacagtcattttgcgcagattttacggcatgtatgtcgccgcaagaatattgctcaaaggcgctaaaagatgatgagcacaacgctttcgagcgccaccagcgcaaaatacaacactatgaaactaatatccagactaatggcgcccaacggcaggggacgaatatagcgacgcagccatctcaacggcggctcggtgacggaatacacgatattgatgagctgagccaccacacctcgcggataccagttacgagcaaggatggagacccagtcgagaatcatgcgcacgaacagaacagtgatatatgcgttgatcagccatgcaaggacacggccgatcatggcgaatacaaaggacaacatggtgtcaccctaacaagcatgtatgagaatttgccgacagcgcaaataataacgaccggtctctctcgagtaccggtcgtcgccctggctgcttgccaatatgaagtgctgctagttagcgaatagatcgtgcgcggaagccgtagtggtcggctcttcgaccttgatgttcacctgagccgggctcagcaggaacacgcgcggggttacacgttcgagcgagcctcgcacgccaaataccacacctgcggaaaagtcgacgatacggtaggccacggcttcgggaactccagtgaggttaaggacgaccggcacaccatcacgcaacgcacgacccaccagctgcgcatcctcataagacttgggatgaatggtggtgatgcgattgacgcgaccaccctggaaaggagaagtcttggcagatggactggccgtcgactgcgcgatcggagtcaccgtgtggtcagaatcgaaactcggcttggccgcaggctgctgctcatcctcctcatcgaagtactcgtcatcatcatcgacgacatcactcatgcccagataggacatcgcattcttcatgaacccagccatggatcagtcctttcagcgcaggaagtcggggatatcgaggtcaccggccggatcattgacggcgatggccggatgttcggaagtcgagtcatcgaacggcagcgaagtcgaatcgccggaaacgggcgcatacgacggaaccgtggcagccgcttcaccagccggattgtcggcaggatgagctgccgccggagcgacgggctcgtcggcaggaacgaccggggacacagtctgacgatcagacgcctcctgtgcggaaacaggatcgaagccagcggcgataaccgtgacacgtacttcgtcgccataggcgtcatccaaagcgagaccccagataatctgtgcctccggatgaatggccttacgcaccagctcggtagctgcagaggcctcctgcagcttcagatcagtcgggccggcgatgttgatcaatgcaccatgtgcaccctcgatgctctcttcgagcagtggggagctgatggcgatctcggcggcctgagtggcgcgatcctcgccccgcgcggaaccgataccgaacagcgcggtgccggcaccacggaggatggagttcacgtcggagaaatccacgtgaatgtaggaattcatcgagataaggtcggtgatgccctgcacaccggcaagcagcgcggtatcggcggttttgaacgcctcgatgataccgatggagcgatcggagagctcaagcaggcgatcgttcggaataacaatcagcgcgtcaacttccttacgtagattgtcgatgccgtagtcggcagaagcggcacgctggggaccttcaaagccgaacggacgagtcaccacggcaatggtcagagcaccctgctgatgtgccgcacgagcaacgatcgggctggcaccagtaccggtaccgccgccttcgccgcaggtgacgaacaccatgtcggcgcccttcagggattcctcgatatccgactggtgatcctgagcggccttggcaccgcgctccgggtcggctccggcgccgagtccacggctggacttgtcggatagtgagattttcacgtcggcatcagaacgcataagatccttcgcgtcggtgtttaccgccacaaattcaacgttctgcagtccttcggcgatcatacggttaacggcgttgccgccggctccacctacgccgacgaccttgatattggtcttgtcgttgaactcagtctgggcgatctcgctcacgtttgactcctgtcacttcacggttacacctaagagtagcgcaaataggatactggtggagggaaattcacgcgaggaaaagtgcgtgttgtgcatttcttgtttgaaattgtcaaccaatcagtagctggcatccatcggatcatcgccaaaaagcgcttcgcgctcctcatgggtggtggttcgtgattccaaccagccgtaaggcaaatgaacctttttggcgaagcgtacacggccacgcggcttgtcgaccacacgtggagggtattcgatgatgggatcaagcttgccgatctctcgatccacgtcggcaagattctcacactccatgaatgccttacgagtactgccgccgaccgggaaacctttgagataccaggcaatatgcttgcgcaggtcatgaacagccatcatttcatcaccttcatagaactgggtcaatagttcggcatgatgatggattacccgacaaacctcgccgaggttcggattaagacgttcaggattgtcttcaaaagcgttcttgatattggcgaacagccacggacggccctggcagccgcgtccgatggctacgccatcgcagccggtctcacgcaccatttcaagcgcgtcttcggctccccaaatatcgccattgccgaacaccggaatatcaaggtgttccttgagctctccgatgcgggaccaatcggagtggccgccgtaatattcggcggtggtgcgggcgtgtagggtcaccgctttgcagccttcctcctgagcgatatgtccagcttcaaggaaggtctcatggtcgtgatcaatgccgactcggatctttgcggttacggggatgccggccggctcgcacacggcaaccacacgctgaatgagttcagtaaagatgtcagttttccagggcaaggccgaaccaccaccgcggcgagtgactttgggcaccgggcagccgaagttcaaatccacatggtcggccatgttttcatcgaccacgattttcgcggcctgttcggtgatggagggattcacaccgtagagctgcagcgaacgaatcttctcgctactggcaaaatggcacaggcgcagagccttggggttgcgcgccacgagggcgcgtgcggtaatcatttcggccacgtagagaccgtcgggaccatattcctcacagatcacgcggaatggccagttggtcacacccgccatcggcgacagcaccaccggagtcggcacggtgatgttgccgagctgaaccggggcaatgtgtacctgcgtttccgggcgtgatggagcgtccgtgcgtggatcgaggttgttggtctcgtgagtagcggtgatggtggtttccatatccatgctcttgctcccgctggcgggagctgtcgaaccgtaggtgagaccgagggtggtcttccttgtgcagaaaagaccaccctcagtccggctgtcgccggccagctcccgccagcgggagccagtcaccttgatatatcaggctttagtacaggccgccggcttcctgaacgccggactcaggccaggcttcgccacccatctccacgggcttcagcggcacgcgggtgcgcttctcgccgatgcgggcggccacatagtcggccaccttgtcgagagcgacgcgatcctgggccatggtgtcacgctcacggatggtcacggcgtggtcctcgagagtatcgaagtccacggtaatgcacagcggggtgccgatctcgtcctgacggcggtagcggcggccgatggcgccggactcgtcgtagtcgatcatccactcgttgaagcgcaggtcatcggccaggttctgggccacggtccgcagttcgggcttcttgctcagtggcagcacggcggccttgaccggggccagacgcgggtcgaggcgcagcacggtgcgcttgtcgacgccacccttggtgttcggagcctcgtccacgtcataggcgtccacgaggaagcacatcagggagcgggtcaggccagctgccggctcgatgacgtacgggatatacttctcgccggtggcctggttgaagtagcacagatcctcgccggagtgcttggagtgcgcggtcaggtcgtaatcagtacggttggcgatgccttcgagctcgccccagtcggagccctggaaaccgaacttgtattcgatgtccacggtgcgcttggagtagtgggagagcttctccttcggatgctcgtagtggcgcaggttctccggcttgacgccgaggtcgatgtaccagcgggtgcgggcgtcaatccagtactggtgccattcctcgtcggtgccgggctcgacgaagaactccatctccatctgctcgaactcgcgggtgcggaagatgaagttgcccggagtgatctcgttacggaaggacttacccatgttggcgatgccgaacggcggcttggaacgggaggaggtcatcacgttcttgaagtccacgaagatgccctgcgcggtctcggggcgcaggtagtgcaggctgttctcgtcctcgaccgggccaaggtgggtgcgcagcatcatgttgaagtcacgcggctcggtccactggccacgggtgccgcagttcgggcagacgatgtccttcatgccgttctccggcatcgtgtcgccgtgcttctcggcgtaggactcctcgagcttgtcggcgcggttgcgcttgtggcagttgaggcattcgacaagcggatcgttgaacacgctcacgtggccggaggccacccacacttcgggaggcaggatgatggaagtgtcgacaccgacgacatcaggacgggtgacgaccatggagcgccaccattcgcgcttgatattgtctttgagagcgacgccgagggggccgtaatcccatgcggaacgggtgccgccgtagatttcgccggcggggaatacaaagccgcgacgtttcgcgagggatacaacttcatcgagtttggactgagccacaatgcaccttctggtttgaacggtttggggtctaataacaaccgcttcagaatagccgtatatggtgacaggtagaaaggcactgtctttttgcaaattgctttcactgaaagcgcgtcagtgagagcaatttgcaaaagcctatggaaacaatcgctctactaccacggataattcagacgcgccagacctgacgacacgtatcgaacaaattcgtcaagataatgtccatgttggcgcatagcgtcggcaacgtaatgcaggggaactcgcatgtggttcgcgagttgagaaaggcctaagcctgacccttagaacctgttggttaagaccatcgtagggagcagtaatgagcagtagtgcatcatcgtttaccggttcgtccagcgactgtaccaccggaacaccggtttcatccgattcaccgattcgcgagaacatcgcagccgccgtgcgccgcgtacgcgagacgacgccgctggcccagtcgttcaccaatttcgtgaccatcaatctggtggccaacgcgcagctggcagccggcggcactgcggccatgagcttcctgccggacgacgtgatcgaaaccgcgaaaatcgcgggcgccaactacatcaatgtgggcacgctgctaccgttctataaggacgcgctgcctgaaatcgcgcagcgactcaattatttgggcaagccgtgggtgctcgacccggtggccgcaggcatcgggcgcacccgcacctctattcttcaggccttcaaggccgctccccctactgtgattcgtgcaaacgcttccgaagtgatcgcgctggcgaatatgtgggggctcaacaccgaatccgcgggggacgcttccgaacaccgccccgccggagtggaatccgtcgatgacgtggattccgcaaccggtgcggcggtggcacttgcccggtatctgaccgagcagcacgccaatcattcgtctcacgatgcttccatcccctgtgcagtggccgtgtccggcatcgccgacctggtgaccgacggcgaaaccgtgtaccggctgtcgggcggcagctcgatgatgaccaaaatcatcggtgcaggctgctcgctgggcggcgtggtcgccacgtatctggcggtgtccgatccgttgaccgctgcgttgtccgcgtcgctgctgtacaaccgcgcgggcgaggtggccgatacgacttcgcatgggccgggctcgttccaggtcgcgttccttgacgcgctgtggaatgtgaccgccgagcaagtggcggaatctgagattttggtgcagtagtgtactgccccgctggcggggactgccggcaaagccggctgggggcggttcctggagttaccatcctccgccgcttcgtggcacctcccgccagcaggaggaaaacactcgataccacatcaaccccaattcacctttccaataagacttccacaagaaacaacaaaggtaggaataataatgagtaatgaatacccatacgcctccatgcgcgacagttttgacctgtccgcgtacttcgtggtgggccccgacgactgcaaaggccgtccgctgaccgacgtggtggatcaggccctgcgcggcggcgcgaccttcatccagctgcgtgccaagaaggccgacgcttccgagctgaccgacatggcccgcgacatcgcgcaaatcatcgaggacaacgaaaagtccgattccgtggcctttgtaatcgacgaccgtgccgacgtagtgtggcaggcccgccgcaagggcatcaaggtggacggcgtgcacatcggccagaccgacatggagccgcgtgaaacccgcgccctgctcggcgacgaggccatcgtgggcctgtccgccgaaaccgagagcctggtccagctcatcaatgagctgcccgacggctgcatcgactacatcggtgccggcccgctgcacgtctccaccaccaaacccgaggcttccgtgggcggcaacgacggctccggcaagacgctggacgcggctcagatcaacaccatctgcgttgccagcgaattcccggtggtcgtgggcggcggcgtgaccgcagccgacatggccatgctcgccggcaccaaggccgccggctggttcgcggtctccgccatcgccggtgccgagaacccggaagaagccacgcgcgccatggtcgaaggctggaaagccgtccgcggcgacaagaagcacggctacgctccgcgcattgtggcccacgcccccgccgccgacacccaggccgcccaggaaggcaccgccgcagccggcagcgaagacaccgaaaagaagttcaccaacgccaagcaggccaaggacgcgcagaagctcgccaagcagcagcgcgtggacatcgccgcccgtggttccaagcagcgcgacaaggcgcacatccgcaagaccaagtccgtaccgttcacctatcagtacggctcctacgatctggaagtgccgtacaccgaaatcaagctgtccgatacccccggtgtgggcccgaacccaccgttccacgattacagcaccgaagggcccaagtgcgatccgaaggaaggcttgaagcccctgcgtctcgactggattcgtgaccgtggcgacatcgaggattacgagggccgccgccgcaaccttgaggacgacggcaagcgcgccatcaagcgcggccgcgccaccaaggaatggcgtggacgcaagcatgagccgatgcgtgccaaggaccacccgatcacccagatgtggtacgcccgccacggcatcatcaccccggaaatgcagtacgtggccacccgcgagaactgcgatgtggagctcgtgcgctccgagctggccgccggccgcgcggtgatgccctgcaacatcaaccaccccgaagccgagccgatgattatcggatccgccttcctgaccaagctcaacgccaacatgggcaactcggccgtcacctcctccatcgacgaggaagtggagaagctgacgtgggccaccaagtggggcgccgacactgtgatggacctgtccaccggtaacgacatccacaccacccgtgagtggattctgcgcaactcccccgtgccgatcggcaccgtgccgatgtaccaggccctcgaaaaggtcgaggacgatgcttccaagctgagctgggaactgttccgcgacaccgtgatcgaacagtgcgagcagggtgtggattacatgaccatccacgccggcgtgctgctgcgttacgtgccgttgaccgccaaccgtgtgaccggcatcgtctcccgcggtggttccatcatggccgactggtgcctgcgccaccaccaggagagcttcctgtacacgcacttcgacgagctgtgcgacatcttcgccaagtacgacgtggcgttctctctgggcgatggcctgcgccccggctccctggccgacgcgaacgacgccgcgcagctttccgagctcatgactctgggcgagctgaccgagcgcgcctgggccaaggacgtgcaggtgatgatcgagggcccgggccacgtgccgttcgataccgtacgcatgaacatcgaactggagaagtcggtgtgcaagggcgccccgttctacaccctcggaccgctgaccaccgataccgctccgggttacgaccacatcacctccgccatcggcgccaccgagatcggtcgttacggcaccgctatgctgtgctacgtgaccccgaaggaacacctcggcctgccgaacaaggatgatgtgaagcagggcgtgatcgcctacaagatcgcctgccacgccgcagacatcgccaagcaccacccgcacgcgatggatcgtgacaatgcgatttccaaggctcgcttcgagttccgttggctcgaccagttcaatctgtcctacgatccggacaccgccatcgccttccacgatgacaccctgcccgccgagccggccaagatggcgcacttctgctcgatgtgcggcccgaagttctgctcgatggccatctcccagaacatccgcaaggcattcggtggcgaggccgctcagcagcaaatcgtgaaggaggctgctgctggcatcgactccgaggcactggctaaggccaaggccaatgtcgataacgacgtggtgtccgccaacgtgctcagccccgaagaaatcctcgccggcatggatgcgatgagcgaaaagtacaccgcccaaggcggcaagctctactccaccgcccaggagtaaacctctctggctcccctctctgaggggagccaattattatgcccggtggtgtcttaattcgggacgacgctcgactcgctcgaaggcggtgacgaggtcggcagcacggatcgcgccgcggcggtccttggcggccaccagagcggcctcggtccagatggcgcacacttcggcgccgctccagccttcggtccgctgtgcgatatccgccaacggcagttcgccctcgattgacagcgaacgggcctgcacctgcagaatacccaaacggtcgcgctcagacggcatcgggaaaggaatctgccagtcgaaacggcccggacgcaacaaagcgggatccacgtcctcaatacgattggtcgcagcgaccaccacaacattgcccttggactcgaaaccatccatcaacgtcagcaactgcgccaccaagcgcttgccgacgccattggtatcgttctcgcgcgaggacgcaatcgaatcgatctcatcaaagaagatgatggcgcgcttgtccgcctgcgcggcggcgaaaatcatgcgcagcgtttcctcactatcgcccacatacttgctcacgatggtcgggccggacaccagatagaactgcgcgtccgccacattggcgatgatgcgggccagatgcgttttgccggtgcccggagcaccggtgaagatcacgcccttgatcggcttggcaccgatcgcacgcatctgcgcactgttgcccagctgcgtttcgataagctccttggcgcgcgtgatcacctgctcataaccgccgaacgaatcgaaggtaagcgacggatcgctgcccggcgtgatgcggtactgcttgatgtcgtcatcgtgatcggattcgcctggacggatggccgtgggccacagcactcgttcaatgccgaacaggtcggtgaactgcacggtgttgccgggcatgatcgaattcgggtaatcgccttcaagcagttcgaggccgtcggaagtctccaggaccacgccttcgttgagcgcacggcgcacgatgcccacacggggcttcaacggccacacatcatgcggcactttacgatagaaatccgtgccgacgagcaacacgtcgcccacatcgaacacctcctgacgcggaaatgtgagctgtgtggtgtgcccattaggcattacgccaaaatatgcggtgcgttcatcgtcaaaaccggtgatgcgtaccaagacgccgtcacggcgcagtacatcgttatcagccatgtcccctcccgaacatttcatgaatcaatcgcaatcagcaaaccctcccatctcaccacaggagcggcaaaacatcaaggaaaaccgctccgaaaaacatcatgggccccacttagaatgaacactatggcacagattgcaacatctacacttcccgctgttctcgcgatctccggctccgactcgtccggcggtgccggcatgcaggccgatctgaagaccatgctggcttgcggcgtgttcggcatgagcgccatcaccgcgctcaccgcacagaacaccaccggcgtgcgttccattcaggacaccaaaccggacattctcgccgaccagatcaacatggtgtttgaggatattccgccggtcgcggtgaaaatcggcatggtgtctgccactgacatcatcgacgtcattgctgaacgactcaccttccatcacgccacgaacatcgtgctcgacccggttatggtggccacttccggtgccaagctcatcagtgacgatgccattgcggccttgaccggcaagctgttcccgatggctacggtcgtgactccgaacattcccgaggccgaagtactgaccgatacgctgattcgcgatcaggaggatatggaggccgccgcccaccgcatcgtggagcgttacggctgtgccgcgctggtcaagggtggtcatggcaccgaggatgccaacgatgtgcttgccgagacggatggaaccgtgacctggtttgatggcgcgcgtatcaataatctgaacacgcacggcaccggatgcacgctgagctccgccatcgcctcgtatctggcgcttggcgacacgctgcccaaagccatcaagcatgcgaagaagtatctgaccggtgcgctgaagacccagctgaatctcggccacggctccggcccgatggatcatttctggaagtatcgctgacataagtgtggttgttaagctccccttgccaggggagcttaacactactgaaaaaggagaatcatggttcttgaccgtaatgccgttactcaggaagtgccgatcgacccggaaaccggcaaaccgtacctcaacaccgtggcagccatccaggtgtcggccaatggcgtgggctccgaggtttcaccatacgtggctcaggccgtcgaagtgattcgcgaatccgccctgccgcaggaaaccaacgccctgttcaccaacgtggaaggcaatctggacgacgtgctcaaggtggccggtgaggccgccaagaagctcgccgagcagggctaccgcacttctctggtgctgcacatggatatccgtcccggcttcaccggccagctgaccgaaaagcccaagctggtggatgagatcctcgccgacaagcaggcgaaatagcaaagcatcgcttccaccagcaagggcatgctttgttattacacgtttcatggggcggtaactcacccatagggcggtaaatatctcatggggcggtaaaaccctcatggggcggtaggcgaaaacggctctattctgcggaaaggcaaaatccgctaaccgccccatgggccaaataccgccccatgagtgttttaccgccccatgggaatcacggttctgccttctttcaacggggtaagagcgtaagtggggcatatataggagcgttacaaactctgttatcgttcacaatgtgaccgcaacgcggcgtgccacaagatcgaacctatagttaagccccatgtagtgagctatctcacaacgattggctcgctacgtggaattcaagacttggactgcaaacgtcgttcatcccacacaatgggagggcgaacggaacacgcagtccaatcaagagttcgctcgccgcaacatcattgagcagttgcacgcgggcaggtttgcaagaagagggctcaaatatgactgctgctgaacagcagatttccggcaatcccgcggctatggaaagcgcacaagcacgtaccaccgtgacggatcaagccaaggttcaggatattatctcgcgcgtggatcgcgcacatgaaaccccgatgttccatcgcatcgtggcgctggtcgccgctggcatgctgatggacagcatcgacgtatatattggcagtgccgttgcctccagcgcgttggccacacactggtccaccgttgcgcaaaattccacctttatgtccgcaggcttcctgggtctgctggtcggttcgctgctggccggcttcgtcggtgacctgaagggccgccgcgtggcttaccaaatcaacctgctgctgtttggcggcttcaccttcctcggcgcattcgccccgaacatggccgtgctgtccctgtgccgtctgggtgccggcctgggcctcggcgctgaaatcgtcaccggcttcgccatggtcaacgagttcgcaccgatgaaccgccgtggccactggtgcgcgattgtctcgctcgtggccaactgcggtgtgccgatcgctatgctgctgtgtgcatggatcatcccccgctggtcctggcgtccgctgttcgtggccatcggtctgggggccgccatcatctggtggctgcgccgcgacatccccgaatccccgcgttggctcgccgtgcacggccgttacgatgaggccgacgccatcgtcaagcagcttgaggccaacggctccgaactgatcgacgcagccgccaaggccgacaccagcgacacccgcaacgccggcggccgttcgctcggcatctgcctgcttgtagctgtggttgctgtggccgccacgaacgtgtgctcctacgccttcacttcttgggttccgacgattctggtcaagcgtggtattaacctgtccagctcgctgctcacctccacggcgatgatgctcggtgccccggtcggctgcctgattggctctctgcttatcgaccgcatcggccgcaagcgcacgattgtgccggccttcctgttcactggcgtgttcggtttaatgtatgccttccagacctctaccgtgagcgcaattatcgttggcttcctgctcatgatgtgcctgtacgtgcttatggcttccgtggtggctgtgtacgctccggaactgttcgccaccaaggttcgcttccgttgcgtcggcttcgcgaacgccgtggccaagctgctcaatgtgttgatgcctatggtggtgggttggatgcttacctcgcttggtgccacgtccatctttgtggccatcagcgcaattgctattgcatcgatgctgattgtcggcttctttggcgcggagactgcgcagaagtcggttgggtgatcggtttcctcacagtggaataactgctgataatgtccattcggcgtcttgcgtggtgatatgcagggcgccgttttgttgttctagtaattgtcggtaacggttgagaccggtaccggtggataggtccacactgccatccgcatccgaatccgatgacgtgcgggccgtgtcgatgcaggcgatgcggacggtgtccagtccgatgccaatcgtcattacatagcccgcttccgggtcggcatgtttggcgatgttgccgtacagttcctccagcagcccggcgatcaggccactccgaccggctgcgccatgagcaccggaaataatcgtctgaccttcaaagccaagctctgataatcggcggtcaccattgctcgcaacatcacgaatttgctcggctagcgggcaatcagcgtctgtgatgccacatgcaatgccagaagcggcatcaacggtcgaatcatgcggagtcactgcactgtgcgccgcttctcccctgccttcaataacatcaatgacctgatgcgtgcgatccaatgcgcccatagccacgctacgcagttcgcgtaattcttcttcagaaggggtcttgccatcggcaatatccttgtcgaatcgcaaaatcaggtatgccaaatcattggatacgtaatcgtgaatgtcctgagctgtgcgttcctgctgacggcggtgagccaactccgctcgagccaagctgcgttcatgattccatcgcgccgccatgccaccaagcatgaagccaataaacaacacggccactggcatcacaccatagagggcaatcgcaccaagaatcacttgcccagtgcgatgctcggcagaagaaccgctcgattcataggcgcttccggtgaagtcgcttcccgactgccctgcgctgtcagacccactggatgaagagccaccatcagcagcgccaccatcagcaacactaccgtctagggcactactactcgccgcgccatccgcagaaccgctcatcgtgtctgagccgccatcaagccaaggaatggccacgccaccacgcgacaacatccacaccacaacggcaatgccggcaaccgccagcgccaatcgcttatcggcgtatccggcaatacccaccgccaataacacggcgagcattgcacccgacggcatccagatcggactcatgcacaacactatccaagccaccgctaccgccacgcatccggtgaccggacgaaacgccatccaccccacaatggcaacgaatatgaactccgcaagacagtccgccgccgagacactgtcagcagccaagcccgccatggtttccatcgtgcatatcaaggcaacaaccagtatggcaatcaacagccatgcattgcgaacaccgctatccagctcggccaatcggtgtcgtaacgctttcatagcagttcctttcctaccatccatgccgttgcacataccgcccatgccaactcttaaatctcatgccgtttcacgcaaattgatatggcatgagcgcgactgcgagcgccgagtttggcgagtgcgcggcgttcaaaagtcgccacagtggccacgctgatgcccaatcgctcggcgatttccttggtggtcgacccatccgcatacatacgcagggtgtcgcgttctttgccggaaagcgcgccacggtgcgcgtatgacgtatcttcgagcaccgtgtaggcggttgcggcatccatgaaggacagcgaattaccgctcccctcatctcccagtaccagctcattggtcgacaatccttgggctgcattgcgaatagcgagcgcaatgccgttcaaatcggttttaccaactaaggcctgcgccccgcagcgagccgcctcgtcgtgaaatgacgcgagcgcgtatgaggtgacacccaccagcccaacctcgggtgttttggtacgaatcgcacgacagacttcggtaccgggcacgtcgcccatagacatatccgtaaccagcacgtcaggccgcttggtggggctcaggcatcggctgatggccacggcacccaaatcgcaggtccatatcacggcaaaatcgctggacatgcgctcgattagcgcaccgaacactttcagcgcatacgggtcattgtccacaatgccgatgcgtatgttgcggttgcgcgcttctcccattacattcaccccttcagtgtgcccgacgccgaactgctccgtcctgacatgtcatggtcactatgacaactatcattccacatttcctgcgcgatttacgatggaatcatcatcaatccttgacaaggcggtaaaggaggacggcaatgaaccgtgcacaagcactcagcaagctcaacaggagcgatatgcgcaatgccgccgccgagcgcgggacgcaacgaatattcgcgtggaaccgcgcgcattggattggcatggttgtactgatagcggtgttgttgctgctgcagtggagctcatcaatgtatctcatgcccgacgaggtccttgacagggctgccaaaaacctgttcgtatggttccccggtatggttctgcactggccattggtgttgggaatcaccaacctgatactcggttcgatacgatccggcagtctgtctttcccattggcgagcgcaatcatcggaccgctggcattcggctgtaccaatcttcgcttacggccggtgttcccataccgttcctgggctcagtggtggaagctaatgcacgctgaaagcggccatcagctattggttcattcgttgatcggctcggccatgctgttgatctgttatacggccgttgcgttcatctgctatgcaatcggacgctacggtctgcgcgaattgtttgtggatccgaatccgcagacggcgagcggacgactgctcacatggattcgtcaggatgcgattcgcttcggctgctggctggcgacggcaatcatgtacggcttgctattggcgctgaccttacgaggcggcatggctgcgatggccgccgcgttgctaatcaattttgtgattccgcccgccttgctggtcatcaacggcatctacacgctacgcccggcctcactgacgtatccgtggaaaagcctgctgttcccgttggcgtgcacactggtacctgcgccgatgctcatggcgctcatcacggtgtatgaagacacgtgcccgataggaagtacctgcacgctgatcggcgaccgatacctctcctggggctcgatggatcaggtcttgcatttcgtcatcgtgttcgccgtggcgagcttcctcggattcggcgtggtgtgggccgtgcggtggattgtggctcgtcgcacaaaataagagagaccaaaatatactggaatcaggggcttcgtgcaatgatgcacgagccgatccaagcaaaggggctgaccatgagcgagaaactgatggaacagtaccggttgcgcaaacaacgcaaacgccgtaacgcttgtatcgccgccatcgtgacagtagtgcttgtccttgccgtcgccggcggcgtatggtggacggccggcgatggcagcgtactggttcgcaatatgttcaagccgaaggccacgcctgccacgcagccggtagtcgacagcaccgcagccttcgcctaccgcaccgcaccggaattcctggcgatggaaaccggcgaccgagacaccggcaatgtgaactactcccctgcttcgatgtggatggcgttggccatcgccgcgcagggcgccaatggcacgacccgctcgcaactgaatgagctgctgggctccggttcgctggccgacagcgactaccaatcgctgctgagttcgatcaacgggcaatattcgggggcgaaatccgagatgagcgccgcgaactcgctgtggatcgataacgactactcccttgccagcgattaccaatccaccgtcaagaaaatgttcgaggccgaagtcaccacgctaccgttcgacgatcaggccgccgccaagatgtccgattggattgccaaacatacgaatggttcgctcaagccgaagatcacgctgcgtgaccgtgaagtcctgtccatcatcaacaccgtctatgcggatggccgctggaaggatccgttcgaagaacagtccaccggcgacggcaccttccacggcgaagccggagatgctcaggtgccgatgatgcaccggaccttcagccaaatgacttacagccatgatgagtacaacacttggcagcgggtggagattccattcgacaacagcggcaatctggccatcgtgctgccggccaaagggcatttcgacgagttggccggcgatgctcagaaactcggatgggcgttcggcacgtgttcgtcggcaccccctggcgaggacgcaatgggttgcgccgcggacagtatgcccggatggggcgtctccgtcaactcggccacggtgaacgtctcgctgccacgattcaccatcgacagcatgttcgactcggaagccaccatcaaggcattcgaaaaactgggggtgaccgatgcgttcagtgcaggcgacgccgacttcaccaagatggtcgacgccggttcgcacggcgagaatctgtatatcggttcgattctgcaaggcacgcgcatcgaggtgaacgaggccggcgccaaggccatgtccttcaccaaagccggcgcagacttcactagcgcgccggtggacaacatcgagttcacggtggatcgcccattcctgtattcgtacgtcaccccggacggcataccattattcatcggtgcggtgcgcaacctcggcggagtcggtggagaacactgatactttcccgacagtccgtcaattagggtgtatcgtttgacgcatggctacgatgaaggaaatcgcgaacaaggcgggggtttccgtctctacggtgtcgctggtgctcaacggacgcgacgaggggcgcgtaaagtccgaaattgcggacaatgtgcgcgccatcgccaccaagctcggctaccggtcgaatccgctggccagttcgctgcgtacaggcaagacgcacatcctcggtttcatcagtgaggaggtggccaccaccccgtacgccggcggtatgattctgggcgcgcagaccgccgcaagccagttcggctatatgctcatcaccgtgagcaccgacggtgagaacagcgagagcgaggaaatcgccgcactcaagcgatacggcaccgacggtttcctgtacgccaagatgtcgaaccgcatcacccatgcgccttcttcgctggccaagacgccactggtgttggtggatgccaccgactcgcttggcaaaatcccgagcgtggaaccggacgagttccaaatcggctacgacgccaccaccagattggttaaggccggatgcgcacgtatcgcctatgtgggttgctcggaaccgatgattgcgcaggatggtcgtttggaaggctatcaggcggcgctcagggacgcctgcctcgactatgacgatcgtctggtcgtcaatgtgctcaataacgggccggcactgaccgcagtcagcgatttgttcgacgccgagcatccggacggattcttctgcttcaacgatgcccgcgcctggtatgtgtacgaatgcgccgcacgccgaggactcacggtcggcaaggacatctccgtgatcggcgtggacaaccatcgcgtgttcgccgaaacgctggaaccgatgctcaccactgtggaactgccgcatttcgagatgggctactgggccgtggccaagctggtgtcaattatcgaaggacgctcgatggacgacgtctcacggccagcgaccaccgctcccctgccgccgatcgacgcgccgattccggcgaagatccactgcacgctgatcgaaaaggcctcggtgaagtaaccgaggcccacgcgatttctcaaggcctccgttcagcacggaggcctttttgcgtctcgaacgggtacgacacgccgatgacgtcaatcgattgacgtaaatcgattgacgtcgcatagtaattactacacaacaacttctacaaaggcacagccgcccgagcagaagcgtcacataaccaataaccaaccaagtagtaatcaaaggatgattatggcaagtgcaaccaaatctgcatggaagaatccttcctatctgcagagctccttcggcatcttcatgttcttctgctcctggggcatctggtggtccttcttctcccgctggctcaccgacccgacccacggtctgggcatgacctccgcagagcagggccagatctactccattaactcctcggcaaccctggtcatcatgttcgcctatggtgccatccaagatcagctgggcatcaagcgcaagctcgtgatcttcgtctccgccatcgcagcgctcgtcggcccgttcgtacagttcgtgtatgccccgatgctgactgccggcggcaccacccgtttcatcggcgtgctcatcggctccatcgtgctctcctcaggcttcatggccggctgttccctgttcgaagcgctcaccgaacgctactcccgtaagttcggcttcgaatacggccagtcccgcgcttggggctccttcggctacgccatcgtggcactgtgcgcaggtttcctgttcaatatcaacccgctgctgaacttctgggtcggctccatctgcggccttggcatgctgtgcgtctacgctttctgggttccggccaagcaaaaggaagagctcaagaaagaagccgatccgaacgcggctccaaccaacccatccttcaaagagatgatctccgttctgaagatgccgactctgtgggtgctcatcgtcttcatgctgttcaccaacaccttctacaccgtgttcgaccagcagatgttccctaactactacgcttccctcttcccgaccaccgaaatcggcaacgccacctacggcaccctgaactccttccaggtgttcctcgagtccgccatgatgggcgtcgttccgattatcatgaagaagatcggcgttcgtaactccctgctgctcggcgcaaccgtgatgttcctgcgtatcggtctgtgcggcgtgttccacgatccggtcagtgtctccatcgtcaaactgttccactccatcgaggttccgctgttctgcctaccggcattccgctacttcaccctgcacttcgacaccaaactgtcggcaaccctgtacatggtgggcttccagatcgcttcccaaatcggccaggtgatcttctccaccccgatgggcgccctgcatgacgccatgggcgaccgtccgaccttcttcaccatctccggcatcgtgctggccgccctaatctacggcttcttcgtgatcaagaaggacgaccaggaagtcggcggtgatccgttctacaccgataagcagctcaaggcccaagccgcagctaaagcaaacgcctgagcgcaaccgccaaaatcggcaaaaacacaactaaatcgtgctgcccgaagcgtttcccctttttccgtttcgggcagcattcttaaaacttttatctaaaaactcaataagcaacaattcaacaatcgcaagattcaacaatcatgaagaaaggctattcaacgatgactggcttcactccggatgcacccgtcctccacgaaatcaagaaccacagcgaagctctggcacaggcggaagcaggcgttgcagctatggccgccgaacgcaacaaccgctggtacccgaagttccacatcgcatccaacggcggttggatcaacgatccgaacggcctgtgcttctataagggccgctggcacgtgttctaccagctgcacccgtacggcacccagtggggtccgatgcactggggacacgtctcctccaccgacatgctcaattggaaacgtgagccaatcatgttcgccccgacccttgaagaggagaaggacggcgtattctccggttccgcagtaatcggcgacgacggcgaactcaagttctactacaccggccaccgttgggccaacggccaagacaacaccggcggcgactggcaggtgcagatgctcgccgagccggacaacgacgagctgaccagcgccaccaagcgcggcatgatcatcgactgcccgaccgacaaggtcgaccatcactaccgcgacccgaaggtctggaagaccggcgacacctggtacatgaccttcggtgtctcctctgcggacaagcgcggccagatgtggctgttctcctccaaggacatggtccgctgggaatacgagcgcgtgctcttccaacacccggatccggatgtgttcatgctcgaatgccccgacttcttccccatcaaagacaaggacggcaacgagaagtgggtcattggcttctccgccatggggtccaagcccagcggcttcatgaaccgcaacgtcaacaacgccggctacatgatcggcacgtgggagccgggcggcgaattcaagccggaaaccgagttccgcctgtgggattgcggccacaactactacgccccgcagtccttcaatgtggacggccgtcagatcgtctatggctggatgagcccgttcgtgcagccgattcccatggaggatgacggctggtgtggccagctcaccctgccgcgcgagatcacccttggcgatgacggcgacgtggtcaccgcgccggtcgccgaaatggaaggcctgcgcgaggataccctcgaccatggttcgatcacactcgatatggatggcgagcaggtcatcgccgatgacgccaaggccgtggaaatcgaaatgaccatcgacttggctgcctccactgccgagcgtgcgggcctgaagattcatgccactgaggacggtgcctacacctacgtggcttatgacgaccagatcggccgcgtggtggtggatcgtcaggccatggccaacggcgatcgcggctaccgcgccgccccactgaccgacaccgaactggcctccggcaagctggacctgcgcgtgttcgtggatcgcggctccgtggaggtctacgtcaacggcggccatcaggtcctaagctcctactcctatgcctccgaaggcccacgcgccatcaagctcgtggccgagttcggcaacctcaaggtggagtccctgaagctgcaccacatgaagtccatcggactggagtagaccgtaaagacaacgccataagcaggcgagcaatctcaggagtcggccacgctcctcccaaaagcagaccgaaccccaagcattgagccccgaccaccagacggtgatcggggctcaatgcttaccaggcgcagtagctgtgattactgctgcttggtgctggcataatatgcagcgccgacgatgccggcctgattacgcagcgtggcgggcacgatcggagtcttgatgtccacatagggaaggaacttgtcgctttggcggctcacgccgccgcccacagtgaataggtcagggttgaagtacttctccatgaggccgtaatacttggtcagtcgcttggcccacttcttgtagcccaactcctcgttctcacgcacggccgacgatgcatacttctcggcgtcaaggtgcttggggctcagcatgatgtggccaagctctgtgttcgggatgagcgcgccattgtagatcaacgcggtaccgatgccggttcccaacgtagtggcaatcaccagaccgtcctgccccttggcggcaccgaactggacctcggcaaggccagcggcatcggcatcgttcaccacgacaaccggacggccgcaagcttcggagaacgcctcggtaacatccacgccgatccaggactgatcaaggttggccatgaagtcaagcttctggccaggcttgattggagcaggaaaagcgatgcccacaggtgcggactcaggcacttcgaaatggtcgagctgctgcttgactatcttggccaccgcctgcggagtggaaacctccggagtgagaatcttcagacggggttcggcgaaatcgcccttggccagatcgacgggtgcggccttgatgccggagccaccgatatcgacaccgaaagcctgcgcagtttcaatcatcgttgatgtccttcccttcagtattgctttcgttaggattgcgcccagtctaacgcgaatatctttcaaacacgaaaccgacattccacctattgtgcaaacgtgtgcatttttgttgcggcactacgtatccaggacttcgaccccttcgctccttaaaaaaatacggcacaagggaacaccgcgcacagccatcatttccacgtgtcgcgcgcgataatggaatacatgacagaacatacccaacttattgatgcggtcaacattcgcaccgccgtgcgtacctatgatgacgaaccgatcgatgacgacacggcccgtcagctcgagatggcactgcagccaatcaacctgctcggcgatctcaacattcagctggtgcgcaaccagccaaaggtattcgaggccaacgcctcaggccatctgaccaatgcggcgaattatctggccatcgttggccccaagaacgatgaggaagccagggaacgcgccggcttctacgccgaacgcctggtgcttaccgccacgctgcgaggtctcggcacactgtgggtcgccggctcatgggacaaggacgaggccgccaagcactgccgtgtggcatccggtcaggagctctatctcggtgtggtcatcggccatcccaagaaccatctggagtatcgggcgaaatcctatgaagatctctgcgaggcccagcgcacgcaccggccgaccaaatcgtatgagcagttcaccgccacgatgggcgatgaagaacgtgactcagcaccagcgtggttcaaggccggcgtcgaggctgcgatgaaggcgccgagcgccatgaaccgtcagccgattatgttttcgtacaatccagccgacgacactgccgccgcgcatatcgacaccacagccggtgacgagcatcatgcgatgaacgacatgggcattgccgaactgcatttccaaatcggcgccggccagggccaatgggcatggggcgacggaggcctattcatccataagtgaccgttatagtggctcccagctttgaggggagccaccactgaaagcaactgaggggagtctcagaggtacatctccgacagactcccctcagtctcgctacgcgagccagttcccctcatagagggagccaagtaaggactacttcagcggcggcatgggcttccaatcaggatcgtgcatcaacttgcgcgagtcccaccaacctttgacaatctgcaccaagccggtcttgacatgctcccgatccaccatcaccagacgaatgacttccttgatggcggtgagcacagtacccagagcaaaaagcatcggacggaaatcgccatacaccatgaaataccgggccatatagccacggttgcgcatgatgtggtagcggttcatatccgacgtggagttgagctggcgcatgccggctatatcccagtttccaatctcacgcgtgcgtcgcaacaccacatccggcaccacaatcgggttggtgaccttgctggcacgatagccgtaaatcgtgtcatcccagtagatgaagaatcgcggatccggcaggccgatttcgctcaccacgcggcgactgaacagaccgccttcaaagcacagggtgttcattacacggtatttggcagggccgaacgcggcaggggcaatcggattcggaatgcccagcggcacaatgaagtcatactgccagtagaacgggccgccatcgtaatcgaaacgggagccctgaatcacctcatgcttatcagtccacttggcaagcttggcgatggcatcgggcagcacggccacatcatcgtccatcacccagaaccatgcggcacccagctcatatgccttggccacgccagcggagaaaccgccagcaccgccgagattctcggactgcggcgcatagaccacacgctcctcattgcctgattgatcggccacggtagtgccccactgaccggtcaccttgccggcaaaaccagcaaccatatccgcggtttgcttggactgctcattgtccacaatgacaatgcgccacggcgcctgctccagtgccagaattgaatcgaacagcacttcaagcagttgctgacgcttgtatgtggtgacgatcaatgccagtttgtcgatagtggtattgggattcttcacttcagccatggtatccattgttgcacttgaccagcacaaaccctctgaacgtctgctgaatctcagctgattgctgttgatttccttgccgaaagtgaaacgcagcttgcacacgtccggcgtatggcgtatgaataagcctgtcagtttcagggaaggtgtaattccttactggcggtgatctgcactccgggtttcataacggagatgtcaggaagcccgcgacccgcgtaagcggctgatccggtgagattccggagccaacggttatagtccggatggaagaaacgagggctctgatgagcatatcttcgcgtatccgcatgcaagcaatccgttccgtggcgccgcaggctgaaggtgcaggctccggctcaaccagcacgtcttccagcaccaaactcggctcacacgccaccggcgtggccgattcgggacgctggtccacacgtcgcattgccatgtatgcattgttcgtagcgctggcgatggtgaccagcttcatcgaattcccgatcacgccggtcacatggctcaagtacgacccgtccggcatcgtatgcctgattgccggattcgcttatggaccggcagccgccgcgattgtgtccgtgctgggcttcgtgcctcatatgttcgccaacccgtggggttcgctgatggcagtgctggtggcactgttcctgtcggttcctgccgcgttcatctaccgcaagattcgcacgcgcaagggtgccgccatcggcattctggtgggtgcggttctggctatcgtggtggcgctggtgggcaacctcatcgtcacgccgatctacgcgcacatgacctatcaggcagtggccgcgatgattctgccgatcctgctgccgttcaatctggccaagatggcaattcacgccgtaatcacgttcctgatctacaagccggtctccaacctgctttccaagcagcagtgagcaacctgcagccatgactgaatccgcccataaccccgcctatgcccacgctgccgagctgaagaatatccgtttcagctacgaccgtggcaactcctgggctttggacggtgtgtcattgaccgttcgggccggcgagcgcatttgtctggtcggcccgaacggatccggcaaatctacttttgcccggctgattgccggactggccgcgcccgacggcggcgacatcacgttgttggggcatcgcgcctacgccgatgccctgccgaatgccgacgaatatcgtgcggcccggcgtggcatcggcgtggtgttccagaatccggaggatcagctggtcactaccgtgctggaagatgatgtggcgtttggaccggaaaatctgggcattgaacgcagccgcatcggagagcgcatcgatgattctctaaaatcggttggattggtgtccttccgccagtccgatccaactcgtatgagtggaggccaacagcaacgcgccgccattgccggcatgctggccatgagtccggccatgctggtgctggatgagccgaccgccatgttggacgagtcggcgcgcgccgaagtgatacgtattctcgatgatctgcaggcgcaaggcaccaccatcgtgcatgtcacacatcatcaggatgagactgtgcacgctgaccgcattgtgcatatggaatccgggcagatcgttggtatcgaagcggtcagcgctcggccgcaaaccattgccaaccatccttcacccgacaagccccaccagccggggcgggatgtggcattccccttactctcggatgcttcaaacgacgacgccacagaccccatcatccgggtttcgcatgtgacatatcgatatccctcggccaagcatgcgaccatcaacgacctgtcgttcactatcgcgcgcggccagaccgtagcattgatgggcgcgaacggctcgggcaaatctactttgattcgactgctctgcgctttggccacaccgagatccggcagtatcgacatagccaacgtgcctgtggcaacatccacaggcaccggtacacgttccaaatccgcaacgcggcagcagcttgtgcagcttcgccgtcatgtgggttatgtgatgcagcatcccgaacatcagctttttgcggataccgtggctgaagatgtggcctatggcccgcgcaatcagggactggcagaaaccgcagtcgccgaccgtgttcacgaagcactggaactgctgcacatcgggcaccttgccgaccgctcccctttcgacttatcaggtggacagcagcgtcttgcggccattgctggcgttattgcctgcaatcctgatgtgctcattatggatgagccgaccgccagtctggatacgcaggccaaagagcgcatccatgaactgctgcgcaccttgaagcagcaaggcgtaaccgtgttgctcattacccacgaccgagcggaggccgaggcccttgctgaccgcgtggtgcgtatgccgaatgcggcggagcaaccggattctccggcaagcgatgccctgactaactccaatacagaagcctcggcatccaacacgacctccgcctctgccggtgccgctttctcggtgattcaccgacttgatccgcgcgtgaaaatggtgggattcctggccgccatgttcaccatgttcgctgtgaatacgccagtgcaacttgtcttgggtctcatggtgacacttgccgtaatcgcagctgcccgactgaacccattatgggtgctcaaatccattcatccgctgctgatgttgatgctgcttatgggcatcgtcaacctgtttgtggtgcgcaccggcaccccagtggtggcgtttggcccattaagcatcaccgatcagggcgtgaccatcgccgtgctgtatacctgtcgtttcatgctggtcatcattttgggcacggtgtttttgaccacgaccacacccaccgccatgaccgatgcattcgccgcactgatcaaaccactgaacaggcttggcgtccacgctcaggagattgcgttggtgatgagcttggccctgcgattcattccaacattgaccgacgagacccgagccattatcgatgcccaatccgcccgtggaggctccatcgaaaccggttctctgggacaacgaatcaaagccatgagcgcgatcatcgtacccacctttgccggaacattacgtcatgcggataacctcagtctggctttggatgcccgctgctatgaggagggcattcatcgtacgcattggcgcgcattgcccattgctggccgcgatatcgtattcgccgcgctcgtcatcgcatacattgcctccattatcctgctctgacgattcagacagcaccggttgctatgcttcttgaggtatacagcatatgtaaggaactattctcatggcattgaccaagaaacaaatcaagcagctacgcgtaatggcgaattcgctgaagcccctgttctatgtgggcaagaacgatctgaccgaatcggccgtcaagcaggccgatgaaaccatcgagaggcatgagctcattaagtgcgccgtacaggatggctcagggctcacagccaaggaggccgccgcggaacttgccgaacaattgggcgccgaagtggtacagtccatcggcaaccgcttcgtgctcttccgccgctcccaccgcgatgatgtggagcatatcaagctcgtacgcgagtgaggtttcgcaccacttatcaataggggctctgctatggcgttaccacagcagagcccctatttttgctcttgtgcagggacgcgcattactgatcgatgatggcgccaacgatgctggagacgatggtcaagaccagagagccgagcacggaccaccagaagccgtgtacaaaaacgccgacaccgaagaggctgacggccagccaactggctaggcgcataaacagccagttgataatcaaggtgaccaatccaagcgagagaatcgcgaatggcaacgacaccaaatgcacaatcggcttgatggaagcattgattaacgccatgaataaggcgaatgcggcgatgccgagaatcggaggctcccctaccggggtcatgccgggaatcaccgcaaccataacggcagcggcaatggtcataatcagccaactggtcaagaaacttctcatggacctatcgtaacgttactcaaccggcatgcatcggcgcatccagcacaaaggacagaaccagcacaacacgccgacgctacgcggctcacggcacattcggctgcttgatatgtaggctttcccctaaaaattaacattcactatgttcgctttttcataaagttaatatcgaaactcacagaatcacataactccccaactgcgttaccaattcatgaacaacttacaaaatggctcatttgaacctttttcagtgctagcgttaagaaccagcacagcacattgtacgggactcttctcacaagagaaaggttatatgatgttcgttttatacacagaacaaatatcatacttatgaaaggaaacacatatgtcggaagaaaaaagtcatcatcgtcaacccggatatgttcggcaaggatgcagaatcaaagacggacgaagccaatacagtgaccaaaagctttggaatcagcgatgacacgctggccgaggtagaggacttcaaggcacagctcaccaagcacgacgcctgggatctgccgttcatgggatacgtgaacgaagacggatacggctatgcttatgtgccggacgccgccgtggcatatgacccgtactgggattcccataaggccttcctcgaactgccggaagacgtacaggctgctctcgccatccgcctgctgttcgcccaccgtccggtcgaccgttacggtgccagcatgttcctgcactatcagcgtgggttcaacgtcaagtttgaaggcgtcggcgcgaacaactactgatcgaatccttatccgctgaagcacaaaggcgcatgacaatgaggccatgcgccttatttatctcccgaaccagacgtcagcgacttacgagattgagcaattcctgctgcttggcataacgagaaacattgtgcagggcaatacgaataatctgctcggaggtttcttccaagtgattgcctccagccacgtgcggcgtaatcagacagcgaggctcaccccacaacgggtgctcggcgggcaatggctcaggttcggtaacgtccaatccagcaccatgaatacgtccctcacgcagcgccacggccaacgcgtcagcatcaatggcatcacctcttccggcgttaataactacggcggtggacttcagcttgcccaggcgggcggcgtccaacaggtggtgggtctgcggagagcgcggcaccgccataaccaccacatccgccaatggcagcaaagcatccaagcgctcgaatccatacattttctcgatgccttccgcacgtacttccggatgccgtcgcacgccaaacgtatgcatgcctacggactgcgccagtcgaccgaagtgagagccgatgtctccagtgccaatgaccagtgcgatgccaccctcagggctcagcgcggaaccctcgtcctgccagcggtgctctcgctggttgaaaccataccggccgaaattcttcatcacggcccacatcatggcgaacatgtgctcagcgacactacgaccataggcaccggtggcgttggtgatcatgactccatgcggcaacacgcctggacgcacataagcatccacaccggcgctgaacgtctgcagccattccagacgcttgtattgtccggcatcgccggcagggaaattgccgataacagcagtggcctcggcacgcaattcctcgggaacgctggctgaccacaccatgtccccacggcgggattcgtcaccaacaaatttctgcggcacatcgcgcgccgccttggcgaacgcctggcgttcggactcgttcagtggcaagcaattgacaatcagcttatgcgcattctcgatccccatggttcaccaacctaggcggcagtacggataatgagaagttgccggcatggttatgacatcatcggccagcgggtcagcacctcataaccgtgcaatatgagtccgccccgagacgtacactgccttctggttttgatccagagcgtgcggccatggcacttcgattgctggcccatcagcacgcacaggtacctgcgccggttggtaaaccttatattccactttttgcaaccgaatgttgaggagcacgcatgcctgagcagcatagtgataatgagaagattccggtccgtctgatcggcgcgattgtggccgtcggttcacttgccttcatcggcattctgaccgaaacggtaatgaccgtgctcttccccgccttgatgcgcgagttccatgtggacacagccaccgtccaatggattaccacgatttacctcttggccgtggctgccacgatgccaatcagctcgttcctgaaacgacgtttcacgttgaaaaccattttcctcgccgcggtgattctggcaatcatcggttcactgatcatgattttcgcccaagccttcccgctgctgatagtggcacgtatcattcagggcatcggatcgggtgtcgccaccccgttgatgatcaacattattcttgagcagtctccccgaacgaaaatcggccgtcttatgggtgttggctcgttggtcatcacagtggccccggccatcggcccgaccgtcggcggcgcagtgaccaccgtactgccatggcgtgcgattttcgtcatcgcaattccgctggtacttctcgcggccgttatcgggctcaaatgcatcgagcaaaagacgccgaccgaagcggcatatcttgatccggtccagttgggctccattattctcgccttggtcggtctggtactggcgctgaatcaaggcggcgtggccgtcagcgcggctgtggccggaggttccgtcgcacattctggtgcaatcgccattatcagcctgatcgttggcgttggcatgttgattgtgttcgccctgacttccaagcgggcattctctcctctgctgcgtctgggtattttaaaagatccggccgtcctgcttcatgcctgcgcctatttgctgctgccgctcgtcgccatcggctacggctatgtcattaccaacgtctcgcagctttcgctgggcgccacagcgtttgtggccggctctctcgtgctgcccggtgcactgattggcgcggtctgcgccccgctcggcggctggttctatgacaagttcggcgcggtcaaaccgattctgattccgattggcattgccattgtgggccctgtgctgatgctgattttctcaatgcggcttacgcctgtgctgctggctggattctatttcattttcggcttgttctatgccgtgggtaacgcgaacgttatgaccagcggcttgtctgaagtctcccccgaattcaagccggacggcaatgccattttcaacacgtgccttcagtttggcggcgccgccggcaccgcattgttctccacgattctttccgtggcccaggccggcgcaggagaagaaggcaccgctgagtttgctcacgccacagccgtcggcggcgcttggacatttgctacaatgaccatcatctgtctgattggctggggctgcttggcagccgcgttccatattcgcacggctcgtaaacgtgtacagtaatctttatgatgcctttatgtctgaaatgactatggaatcgtgcgggcttccgatggattgcagggatgacgccagatcattgaccagctgttgaacctgcaccgttgacgagacatccgccgcatccagactggtctgggtctgctgcaccatattcgaatagtcgttccgggactgctgcgtaatctgattgagcagcgaggcgcacaccgacgtgatggatacgccggagaacacaatggccaccgccaaagtcagtattacggccagcgccacggtacgggcctgcagcgagcgtcggacctcggcgcgaccatgccgcagcaggcgacgtaagctgaaccgagaatagaggttcagacgcggcacattggaggtctgccggatacggcgtgccacttctgtgccgtccagaccaggcagcataacatcaagcaatatcaagtccggcttgaccgtggggaacatctaccgcacgcagtccgtccatgcaggtaacggtatggaatcctttgttttccaataccaagctcagcatctcgccaatggcctgaccgtcgtccacaatgaagatggtcgccatgggtgtttgccttccctttccccgctgttatcgtttcgttatacgctactcccccgtattcacttctggtcgggggcttcaccatgcagtatcggacggattctggccagacgctgacttacctcatgctcgtatccgcgatcattgggatgataatactcggtgccacgcaattcctcgggcaagtattcctgcggggccacggcgccaggccagtcatgggcgtacttatacccctcgtggttgccccattccttcatgagtttggtgggagcatttctcaggtacagcggcaccgcgccaattctgccggcgtccacatcggcaagcgcctgattaatggcattgtagccggcattggacttgggagccgtggccacggcgagcgcggcttcggccagaatgatgcgggcctcgggcataccgaccaaagccacggcctgtgcggccgccacagtgacctgcagtatctgaggtgcggccaggccgacctcttcgctggcggcaatcataatgcgccgggcgatgaaacgggggtcttcaccggccttgagcatacgggccaggtaatgaatcgtggcatccgggtcagagccacgcatcgatttgatgaacgcggagatcacatcatagtgatcgtcgccatccttgtcatagcgcacggtggcggtgtccattaccgtggacacgatgtccggggtaatgataggccggcgggcgcccttcttacgagcctcatcaccggtgaccgcaccggccgccgcttccagaatcgtcagggacttccgcgcgtcgccgccggccatgcgcacgatgtccgccacggcttcgtcagtggccttgacttcgcccttgagtccgcgttcatcggctagggcccgttgcaccagttcggtgagctggttaggttccaaggactcgagtttgactactaccgagcgtgagagcagcggcttgatgacggaaaagctcgggttttcggtggtggcgccgatgaaggtgacatcgcggttctcgacggcgggcagcagggcgtcctgctgcgacttggagaagcggtgcacctcgtcgatgaacaacacggtttcctggccacgcgacaccagccgttcgtgagcgcgcgtgagcacatcacgcacgtctttgacaccggaggtcacggcggacagttcttcaaacacacgaccggattgtccggcaacgatggtggcgagcgtggtcttgcccacgccgggaggcccgaatagaatcacggagcttggtgcggtgaggctgcctttgctggccggattggcaagacgacgcaagggcgatccctgcccaagcacttgggtttggccaatgacctcgtccagcgtgcgtggacgcatgcgcaccgccaacggccgggtcatcgactccggagcatcggccgccccaaacaaatcgttctcgctcatagtgttctatactaccccattattcgaacagacgttcgaactttctcttggctctcctcagtcagcttcgctgacagctcctctcagggaagggagccaaggtcatgagttgctcacccggtaatcgtggaagaccacctcaccggtgtcttgggtggcgtcgagatccacgatgccttcgatggtccagtcgtgatcaccgtcggaatcatcgataatctgacgcaccttccacgtgtgttcgtcgttctcatgcttgctgtccagcatgaagagttcgggcgagcgcgcttcggcaccgatgcccacatactcgtgttcgtcgtagtagtcgtcgagcacgtcctcccattcgtgcacgccgtagccccaatccttgtcgagcgcgcccagcttgtccggctgatcgagatccataagctgcacacggcggaacaaggcattgcgcaccagcacggtaagaccacgacggtcctcgaccaccgcgctttttgcgccgggcgcggccagggatgccgcagcctcggattggtcagccgagtcgccggcattctcccattcgtccaccaacgaggaatcgatggagcgtacgagcacgcgcagccacgaaataatgtcttcgagctgttcatcgcgcttttcgggcggcacggtgcgcgccaatgtgcggtaagcgtccgacaagtaccgcaacagcgtgccctcggaacgggcgatgttgtagcgggcgatgtatccggtgaagtcggaggcggtttccaccatgtcgcgcaccacggattttggcgacagccagtagtcgttcgcccacggcacatcatggcgatactgatcgaatgcggcctcgagcatgtcttccaacggcttgggataggtgatctcctgcagcttgtccatgcgctcgtcgtagtcgagtccgtcggccttcatgtcggccatggccttgtctctcgcctgacgctcctgcgcacgcaacacctgcttggggtcttccagcgtggcctcggccatcgagatgacgtccagcgcgtaggtgtccgattccggatcgagcaactccaatgcggccaacaggaacgggctcaggggctggtcgagcgcgaagtcatccggcatatcgagggtcatgtaatagtctttgccgccatccgcacgatcttcggtctcaatgacctcggtatcgaacaaagtgcggaagatttcatcggcccgctggtgcagatgttctttctgatccggggtctgtgctgaatcatcgataagatcgtcgatacgagcacgcgcatcgccgccttgcgccacttcattgagcaccatagaatgcgtgatcttcagatgcgggaccaaggtttccggagcggcgtcgatgagcttgttgaacgtgccttcgttccaggtcacgaagccttcgggggctttcttgcgcttgaccttcttgagcttcttcgggtcgcctccggccttggctatggccttctggttctcgatctcatattcgggagcctcggctaccaccagtccttcggtgtcgaagcccatacggccggcgcgtccggcgatctggtggaattcgcgggcgcgcaggcggcgcatcttggtgccatcgaacttggtcaacgcggtcagcaccacggagtgaatcggcacattaatgccaacgcccagcgtatcggtgccgcaaatcaccggcaacagaccttgctgggcgagctgttcgaccagacgacggtatcgcggcaacatgccggcatgatggataccgacgccggtgcgcagcagacgttgcagaatcttgccaaaagccgtggtgaatttgacgcctttgatggcttcggcgatggcctgacgctgttccttgctggacacgccggtggaggcaagcgcctgcgcggtttccagcgcggcgtcctgagagaagtgcaccacatatatcggtgtctcgccgttgcggaaggcgagttccacggttctttccagcgggtcgagcgtgtactcatagctcaacggcaccgggcgtggcgcatcggcgatgacatccacatcaggtgtgtcgttaagatcggagagcttgtcggcgatggcatccacgttgccaagcgtggcactcatcagcaggaactgggtttgcggcaaggtcagcagtggcacctgccatgcccagccacgctccgggtcgccgtagtagtggaattcgtccatggccacgaggcccacgtcggcatgcgtgccctcacgcaaagcctggttggcgagaatctcggcggtgcagcagatgatcggcgcgtcggcgttgatatggctgtcgccggtgatcatgccgacattgtcgcggccgaacacctctaccaggtcgaagaacttctcggagaccaacgctttgatgggcgcggtgtagtaggaacggcgaccggtgcatagggcggcgaaatgcatgcccagcgccaccagtgatttgccggaaccggtaggggtattcaaaatgacatggtcgccggccaggagatccataatggcctcttcctgatgcggccacggctcgatgcctttgacctcttccacccagccgaagaaccgttcgtagatatcatcggccgtaagattccgctcgcgctcgtcgccgtcccattcgggagccaaacgccccagggaaccatattccttctcgtcagtcataatgtcccagtctacccagcggcctgttccagcggcgcgaaccaccctccgccgcttcgcagcacctcccaccagcgggaggaacactcacgccagtctgcgacggacctcgtcggggtcgacttccggttcgagcggcggccaagtcatattcatattcttcaacgtggtgcgcaacagctcggaaaccacggcgcgtgaataccaccggttgtcagccggcaccagataccacggtgcggcggcagtgctggtcttttcaaaaacctcctgccaggcgtccatgtagtcgtcccatcgatcgcgggcttcaaggtcggagatatcgaacttccaatatttggtggggtcatcaagacggccgagaaaatgctttttctgctcatcctggctgaccacgagaaagatcttgagaatcgcacatccgctggcggccagctcacgctcgaattcgttaatctggtcatatcgggcacgccatacgtcttccggataggtgccgtagacgtgcggcatgaccacatcctcgtaatgggaacggtcaaaaacggcaatccagccctgcttgggcagttcgcgcttcacacgccagagaaaatcatggtcaagctcctcggcgcttggcttgccaaagccgtgataatggatgcccataggatcgccctggctgaatacatggcgcacgatgccgcctttgccggaagcatccatgccttgcaacacgatcagcaatcttcgcggggagcctttaacaccgttggcatacatgagccgctgatatcgggcgatttcggaggagctgatggatataaaccgttccgcatcctctttgccgccatcaaaccccggcgtggagtcgccttcgacatcagtgacctgcgtccccgggtggaacatcagtcgttgtgctggcggcagagaccatacggcactcagcagttcgctggatttcgccgcgcgggccagccgttcggacacggtggtgctggattcaatgctttctatgcggtcttcggcgagattcagcgtccagtcgatgcgtttatcgcccttccccccgctgggcttatccttaccgtttttgtctttgtcggatttgacgacaccacccaacttgccgtttttacccaccttatttgtctttccgtcttccttggccatgtcaccgattgtacgcttcgccggattcgcgcgtcccggacttcaccgacggcttggcctcataggacttcgcgaaccacttgcgcaagcacatccaccgatgcctcgaattcctcgggcgtggtgtaggcatagctcaggcgaagggagttgtcaccttcgaaatcgtagatgtcgccgggattaagcagcacgccgcgcttcaaggctgcttggaacaggcgactggtgcgcaccggctgttcgaaggtcagccacacatagaatccgccatccggccggctccagtgggcccggcccaagaaatgacgctccagggattccatcgccgcatccctgcgacggtgtagctcccgtttgaggtcaaccagataccggtcatacagaccgctggtcaagaatcgggcgaaagcccactggctgagcagactagcgccgtagtccatctgcattttcacatcagcgagtcgttggacgattggctcattggcaataatccaaccgatgcgcagtccaggagccaacgatttcgaagcgctgcccaaggtgatgaccataccggtctcatccatggtcttcaacggcttcggcatctcgtcgccgaaatacaggtcctgataggcgttgtcttcgataatcggcaatcgattcgccacgcagcagtcgatgaggtcatgccggtgctgattaggcatcgtcacgccggtggggttgtgattggtgggaatggtgtagagcacggcatccgcgcccttgcccgatacagcacggtattctcccaacgcatgttcaagagcgtcggcgcgaagcccctggtcgcccatcggcacgccggacaagcgcattccggccgattggaacacctgcaatgacttgatgtagctcggagcttcggcgaacaccgtgcttcctgcagacagcagactcacggaaatcagctgcagagcctgcaacgcgccggaggtgatcagcacctgggccggcgtgcagttcacccccgagcggcacatatgcgcggcgatcgcctcacgcagcacggtcatgcccgcaggaggcggatagcccagcgaatctatctcctgcgcggcttccgtcagcacctgtttccacatatcgcgcgggaacagtcgcggatccagctcgccggtgcccagtcgtgcgatattcggcgcgaactccatgcgattaatggtctgtatcgtggcgttgttcgcttcaaagaacccggaggagacgtagtcggcccagtccggggcacccggcaacatcaacgaccacgtattgctgacgatgcgcgtaccagcgccatgcaggccttccacaataccgtaatcggccagttcagttatagcggcgataaccgtggaccgattgacgccaaacccttctgccatggctcgctgcgagggcaatcgggcaccgatcggccatacgccactggaaacctgatgacacatgtagtccacgatttgctcggtgaccggcacattcgacgtgcgatccggcttccagtcgataaccaacggcgctattcgtgccatacctctcctcttcctatgctgcgagcgcagacccgcaatccgcacaactaggattacgccaacgtctcatgcccatatccacatgtttggttgagcgacaatgctgccatttggctggttgtcaaccgcaatccactccttagaataatccacggaaacatgaagatgcacggttttattgaattattacgcgcatcgcgctcagtcgcacaatatgtttggctgggtcagacatgaccagccaaacacaattggctggtatttaagggagcagagattcatggggttctacttgcagggactgacgatgggactggcatacgtggcgccaatcggcatgcagaatctgtttgtcatcaactcggcactgaccaagacaagacgcaaggccgtgttcacagcaatcatcgtcaccatattcgacgtggcactgtccctgtcatgcttctttggcgtgggcgcactcatgcagcggtatgagtggctgcagctggccgtgttggctgtgggaggtgcggtggtaatccacattggattggggttgatctttccgggattgttccgccatggcaacgactcgacatcccacagcaccgcatcgaccactgacgctgagatcacggacaagcgagccgacggattggcgaaaaccgtcactactgcatgcgtagtcacatggttcaaccctcaggcaatcattgacggcacgttgatgctgggcgcattcagcgccacattgagcgcttcgcaggcatctccattcattattggagtagaaagcgcatccgcattgtggttcttgggactcactttggtaatttcggcgttcagccagcggttcagcccaaagatcatcaacacgctcaacaaggtgtgcggcagcatcatcgtactctacggcatcaaactgctcgtcgaattcatcatggccgtactgtagacgattcagcgcgcttcttttcgccgcgttttcccattacggccttggtcgcgccggcaccaagtatcgtgaccagcacgccggcgcccaccatcaacgccgatcgttgggcggcatgcaagacggcaaggtcggggccagctgagacggagctgttctcaccggctgcgctatccgacgcagggtgtttgccgatgttggcatattgggcattaatcacgctcggaccggtgagcgtcacatgatcgacggtttcgactttggacacatcgccgttcttgtctaatgtgacgcgggcgcatagggccttggcccagttgatgcgctgccagccatcgctggattgccacaatgggtagccggagtccaaggcagtggctttgagaatcgcattgcgctgatcagcgtgcagttcgggataggccagtcgcagcacgtccgcggcaccgcgtggggccatgaaatcagcaccggattgggaggtattctgcggaaatgtgtaggtaaggcgcgcggtgtacacgcgtacggcagaggcctgatctttgaccggttcgctggctacggaatcaagaaaaccgttcgtgtaaccgcccgcgtcattggctttgacattggcgatacaagcggcgagtgtgcttccgtgttcgtccgcctggcatcgctcggtcaggtagccgcgcaactgacgggctgcgggcacgatggacgagctgaattcattgtgccagtactgcccgttttgggcggaggcgccgatgcgcccacccatgatgtcgagcggataatgcacacccagaacaatgcggttattgccggcctccgaagtgcgggccatgatttgcggagccagttcgggaatcatgccggccaatgcgataccccacgaataggcgccagtagtatgcccggacggataggagctgttcttttgcaggttcgagtagccgggcacgtgctcaagccatgagggcgactgtttgatatccagtgtggcgggaagcccggcaagatcattggtgccgccaaagctgctttctgcacggttcagatacggtctgggatgcatggcagcgcgtttggaagcataggtggatgccacattgaaggagaacacatcggccacggcgttgagtttgccctgcttgaggccttcgctcatatatgcgccgagcactggcccgagcgcatccggcatggtctcctcggcttgcagatcggaatcgacaagggctcgtttgcgctgagcgttgagacccgtgttatcgaggtcttcggcggctttgtggttgatcgccacggcgagattctggtcaagctccatcgttttggcgtcgagtaccttgccaccatgcgcggcatcggtaggcgcctgccaataatccttctcatagtcggagagcaatgccacccagtcggggttgggcagctggtcggcttgtgcggcgggaaccggcatggccaccagtatgagcggcaccagcagcacaataacgacaacggaggataggcgccggaacatcttcatatgttccaacctatcctccgttgaggctacgtagccgagtctcagccaaacacttagtaaattcttcgtgccggcttagcggtggctgagttgtgtcaggcttctggtttgtcttcagacttcagaaatgccggaaactcgccggtgtttggatcggtttgcgattcgggatgggtgacgtcatatccctgttcgtaccgggtgcgacgccaattgcggatcgaggcattggtgccgcgatgatgcacgtgatacttgcgcggtgcaccgccgaacggcagctcctcaacttccttggccactgcaatctgattgacattggacgggtcacccgcggcaatcggagccaacggttcaggttcggtgggcgcggccgtacgctgctgcatacgtgaaggcaaccactcggccaggcgagagagcagccagcaggcgacgaagtagatcaccgcggccatcaccagcgtttgcaggatgttgaagtacatcgagccgagtcggcgggattcctgcagcagatcggtgtacatgataatcgagcccagtgcggtgtctttcagcaccacgaccagctgggtgacggcggccggcagcatggcgtagacggcctgcggcacctcgatctgaatcagcgactgcgtttcggtcagtcccaaggcgagcgaggcctcgcgctgaccgcccggcaggttgccaacgccggaacgcactagctcggcgaccaccgaaccgttgtacagcaccagggccagcaccacagcccaataggacgggctgggcaggcccgcgaacgcgaaccatcgccagaagaaaatcatgagcagcagcacggggactgcacggcagaactcgacgatcacggcggagatgccacgcaccagcgggttcggcagcaatcggcccacgccgaataccagaccgaacaccacagctcccaccacggcgagaacggtggccttgatggtcatccataggcccggcaagtagaagtcagtccatgcttcacgttcgacggcgggcttccacagttcccagctcagctggttctcgccgtcaggcggattgtgcagacgcataagcaccaacaccagcacggccacgaatatgagggccgcaatccagttgacgatacgaatagtgcggcggcccttgggaccgggcgcatcgaagagtacggaattcgaggtatcagccatatccgtcacctccttacggcgagcttgttggacagatacgtggtgagcatgccgatggggatgatcagaatcacgtaaccgagtgcgaagatcaggaagatctggacgatcacgtcagggcggaattcaatcatctcgctcatcagcgaagacgtctcggtggccacggatgcggcggctgccacggtggagttcttgagcagtgcgatcagcgtgttgccgagcggcgccacagaaccgcggaaggcctgcggcagaatgatctcagtggcggactgcatgaagcccagacccagcgcgcgggcggcctcggcctggcctagcggcacggtattgataccggagcgcagcgattcgcatacgaatgcggccgtgtacaggctcaggcccgtgactgccagccagaagaagttcgtagcgaaggtgtcggagaagctgagcttcagctgcgcgtaggcaccgagcaccatgaataccatgatgatggtcagcggcaggtttttgaacagttccacgtaggcaccggccacggttctcagggatgagatcggcgagatgcgcatgacgacaaggatcacgccgagaatcatggagaacagcgcggaccacagggtcagttcgatgttgaccaggaaggcgccaagtacgtcatactggctgaagagttccaggaatccgttcatcagttcttctccccctcgtctggagtgggcgggttgtagcgcacgtcgggcgtgtagttggtgcccttggtgttgtcgctgatggcgttctcccacgagccgtcttggatcatgtccacgatggcgttgttgatcttggtggccagctgggtgttgccctttttgatgcccacgccgtagtattcctgcgtgaatggcttgccgaccaccttgagcttgccgcgcgaggcggaggccaggccggccagaatgatgtcatcggtggtcacggcgtccacgatgccggagaacagtgcggtggcgcattcggcgtaaccgggctgctccataagctggacttcggaggcgaacttttccttgacggtggcggcggaagtcgaaccggtcacggaacagagccttttgccgttaaggtcttcggggccgttaatcgaattatcatccttgcgcaccagcagatcctggccggccacaaagtatggaccggcaaaggagacggccttcttgcgttcgtcggtaatcgagtaggtggcgagaatcatatccacgtcgccgttctggatcatggcctcacgttgcttggagggagcttccttccagatgatttcatcctcggagtagccgagttttttggctatgtacttggccacgtccacgtcgaagcccacgtaggtgccggacttcttgaagcccaagccgggctgatcgaatttgatgccgatacgaattttgccgggctcatcctgtccgcaagcggccagcgacatcgtgcaggccacagcggcgagcgcggcgaccacgcggcaagccctccgtttgaatgtattggtgaatgtcatatcgcaaacccccgtgtctcagtgggtgaggatcttcgaaaggaagtccttggcgcgttcggtctgcggatgctcgaagaactcgtcaggcgtgttctcttcgagaatctgaccatcggccatgaacacgatgcggtcggcggccttgcgcgcaaagcccatctcgtgggtcacgcaaatcatcgtcatgccttcgtgggcgagctcgaccatcacgtcaagcacttcgttgaccatttccgggtcaagggcggaggtgggctcatcgaagagcatgaccttaggccgcatggcgagcgcgcgggcgatagccacgcgctgctgctgaccaccggaaagctgggacggcatcttattggcctgtgaatcgacacccacgcgggcaagcaaatccatggccagctgctcggcttccttcttgtccatgtgacgcaccttgatgggcgcgagcgtcacattctcaagaatggtcttgttggcgaacaggttgaaggactggaacaccatgccgacttcggcgcggagattcgcgagctccttgccttcctgcggcagaggcttgccgtcgatgcgaacatcgccggaatcaatggtttcaagcctgttgatggtgcggcacatcgtggatttgccggagcctgacgggccgacgaccaccagcacctcacccttggtgacggtcatgttgatgtccttcaggacgtgtaaatcgccgaaatgcttctcgacgtgggtcagctcgaccagagggcggttcggatcctcattaccgggcaccagaggagccagaggagcttcgccttgggattcttctcgcgtcgtgcgcgaacgtactgctgtttcgttgttcgtttcagacatgaagaggagaatagcatacaagggtttccaatgtatacacaataatggatgctcaaccgcgaggtctacccaatgcggagacgaactggacgccggggatatcggcgaaaatggagccatcgaccaccagtttggacggacgaacgccagagcccaaatacagtttcggaatcgacagaatgtgctggtccaccagcaacggccagtcgctgggcaaacctatcggcgacatgccgccggattccatgccggtggcctccacggcagcgtcgatcggcgcgaaactgactttggagacctccagcgtgtgcttgaccacgccgttcagatcggcgagggtatcggccgtgacgaatgcggcggcgaagtccggcggcgccttgcggtttttatgcgtgtacacgaccaccacattgccggtgatctcgaacggaatgccgtatttcgggcaccacaggtcggtgtccgattcctcgtccgcgttgatggtcacgcccagaatcttgctttccggcacgcctgccgccaccagcccattgagcttgtcgaacaccggcttggccagcagatccccatcatgccaatccaaaatctccaacgtcatatatgcctccccttttttcggacatagtgaccctcagaataacgaaagcgccagcggcacatgccactggcgctattcgtattacctatgaagcgctatcagtctgcgaaaatgaatctacgcgtgcgaaaaaccgccgtccgaagccgaaggcgcactgagatgcgtcgagtgctgaggaaaggcggtatacgctccgtagattagttttcgtccgcgtccgggtcgtagtcgacgccggtctcggcgcgctgctcgtcggagatcggggccggagcaccggtcagcgggtcgcggccgccgccggccttcgggaaggcgatgacgtcgcggatggagtcggcaccggccaggatggacacggtacgatcccagccgagggccagacccgcgtgaggcggagcgccatacttgaaagcctcaagcaggaagccgaacttctcatcggcctcttccttggtaatgccgagaacgtcaagcacacgagcctggatgtcgtcgcggtggatacgcacggaaccgccgcccatctcctcaccgttacagacgatgtcgtaggaatcggacatggcgtgctcaggatccttgtcgaacttgtcgatccaatccttgctcggcatggtgaacgggtggtgcatggaggtccacttggagtggccgacagccacatcgtcgtcgtccggatcatcggtgggcttgaacagcgggaagtccacaacccaagtgaaggcgaacttcttcggatcaagcaggccctcacgggaggcgagttccacacgcacggcaccgagcagcagctgggaggattcgcgggaaccggcggcgaagaacacggcatcgccttcctcggcaccgacagcctcgcgcagaccgttgcgctcttcatcggacaggttcttggcgacggggcccttcagctcgccgttctcgccaaagaccacgtaagcaaggcccttggcaccgcgctgacgggcccaatcctgccatgcgtcgaactgacgacgcggcgtggcggcaccgcccttgaacaccacggcacccacatacggggcctggaacacgcggaacggcgtgttcttgaagtagtcggtcagctccaccagcgggttgccaaagcgcagatccggcttgtcggagccgtacttgtccatcgcatccttccaggtgatgcgcggcagcggcagctggacctcatagccggcggacttccagatggcggcgatgaccttctcggtcatggccatcacgtcttcctggtccacgtaggccatctccatatcgagctgggtgaactcgggctgacggtcggcgcggaagtcctcatcacggtagcagcgggcgagctggtagtagcgctcaacgccggagaccatgagcagctgcttcaacagctgcggggactgcggcagggcgtaccaggagccaggcaccagacgggccggtaccacgaagtcgcgggcgccttccggggtggacttgatgaaggtcggggtctcgacctcggtgaagtccatgtcctcaagcgcatggcgagcggccttggccatgtcggagcgcagcttcaggttgtgctgcatggacgggcgacgcaggtcgaggtaacggtacttcaggcgcacgtcctcgccgggcagcttgttctcggactcgttctcgagcgcggtggacacctggaacggcagggcatcggccttggcgagcacctcgatggattcggccacgacctcgatcttgccggtggccagatgggtgttctcgttgccgtccgggcgcagacgcacgtcgccggtgacctgaatcacgaactcgctgcgcagcgggcgggccatgtcctcgtcgtagatgacgacctgcaccagaccggtggcgtcacgaaggtcgatgaaggccacaccaccgtgatcacgacgacggtcgacccaaccggcgagggtgaccttctggccgaccagggcctcggtcacttcagtggcatgatgtgttctgtaagccgtctggctcattgtcttagttctcctcgaattttcgcgcgaatacgtcagatttcgacggtttgctgggcaaccacagtatccggttcccacgacgtgcaatcggcggcaacctgctcgccggtgacgatgttcttgacctcgtcaccggtcgattcctcaccctcggcggcactggccgggaaccacacgtacgggatgccgagcttgtccgcatacttgatctgcttgccgagcttggcggcggtgggtgccacatcggtggcgatgccacgggcacgcagctgggcggcgatgcgattggcggtcggacggtcctcttcgttccacacggcgaccagcacagcggcagggctcacacggttggcgtgcgcgccggcggtgtgcagcatgtagctgaccagtcggctcaggccgatggacaggcccacgcccggatacttgcggttgccctgggaggcgaggttgtcgtagcggccaccggagcagatggaaccaagcgaggcggcgccgtcgaggaaggtctcgtagacggagccggtgtaatagtcgagtccacgggcgatcttcaggtccgcgatcacggagccggggcggatggcggcggcctcgtcgacgatcatggccagggtatcgagtccctgacgggccagctcataggcctcggaatcctcggcgatgccgtgcgcctcgcacagcgcgtcgaactcggcagccagctcggcaccatcggaggcggtaagctcggccagttcgaggcaggcgcgcgcctgggcctcggtcgcaccgcaggtttcggaaagcagtcgggccacctcgtcggcgccgatcttgtcgagcttgtcgatctcgcgcagcacaccttcgatgtccgtcagaccgagtccacggtagaagccttcggacagcttgcggttgttggcatgcacggtggccttgggcaggccgtatgcgcgcagctcttccaaggcggaaaccatgaccagcggcagctccacctcatagtggtcaggcaggtcgcccgcaccgatcacgtcgatgtcggcctgcacgaactcgcggaagcggccctcctgcggacgctcaccgcgccagaccttctgaatctgccaacgcttgaacgggaaggtcagcgcacccgagtgctcgaccacataccggctcagcggcacggtcagatcgaaatgcagacccagacggtcctcaatcggagtgtcggattcgtgaccgacctcctgcagacgggaaagcaggtagatctccttgctggtctcgccttttttcagcaaagaagcgccggtttccaccgctctcgtctcaatgccgatgaagccattgagctcaaaaaccttacgaagcgtgtcgatgacacgctgctccactacacgttcggaggggagccactccgggaatcctgatattgatgcacctttagccacgaaatcaatataataggtgagggttgcgtcaaagcatgccgaattatcggtatgcgaggcgttcccactcactcactctatgcttgtaaggagctggccatggccgacgagactgtcaccgaaaccgaaaacaccgctgcgaccgaagagcaggcaacgacacccgcacccgaggccagcccggccacaccgactcctgcttcaatgccgaagccgcatgcgccctcccccgccgctttcgctaagaaggcccccgcggccaaggcccacgttgcggccccggccgcgcacgccgcatactccgacgccgatgtcaaggccgctgaagccttcggccgcgtggacgacaacggcaccgtcttcgtcaaggagggcgacaccgaacgcgaggtcggccagttcccggacgcctccaaggaagaggccctggcgctgtacgcccgtcgtttcctggatctcaaggccaagcttgatctgctggccagccgcctgacctctcccaatgtcaaaacccgtgagatcgacgagtccctgaagctgctgggcgaggagacctccgagcccgcagtcgtgggcgatgtcgccgcgctcaagaaacagttcgagacgctgaagaccgccggcgaggccaagaagaccgaactgtccgaggcccgcaaggccgccgtggccaaggccgtcgaggaacgcaccgccatcgtggagaaggccgaagcactgaccgcctccctgggcgacaacaccaactggcgttccaccgcggacaagttccgcaacctgttcgatgaatggcagaatcaccagcgcaccaccatccgcatcgacaagcccgaggccgaggcactgtggaagcgcttctccgccgctcgcaccacgttcaaccagtcccgccgcaagtgggcgcaggctcgcgacaacgagcgttcccaggccaaggaagccaaggaagccatcatcgccgaggccaacgagctgaaggattccaccgcctggggcgagacctcccgcaagttcaacgagctgatggaccgttggaagaaggccggtcgcgccggccgcaacgaggacgacgccctgtgggccaagttccgcgaggccgccgacactttcttcaacgcccgtcaggccgaccgcgatcagatcaactcctccgagaaggagaatctggccgccaaggaggcgctgctggtcaaggccgaggctttggtgccggtcaagaccgacgcggaagccaagaaagcccgtcaggagctcgccaagattcaggaagagtgggatcagatcggctacgtgccgcgtgacgccatgcgtcgcatcgagggtcgcctcgacgccgtggacaagcaaatcaaggccatcgaggatgccgcctggaagcagaccgacccggaggccgatgcccgtaagtccagcttcgaagagcagcttcatgctcagctcgccgtgcttgacgagaagatcgccgctgagtccgacccgaagaagaaggccaagctcgaggccgagaaggccaccaaggagcagtggctgaacgccatcaagtaagacttccgcttatgcccccgctggcggggggctgtccaacatagtcggactgggagtggttccatacaacggccacccccagtcggcaaaccgacagccccccccgccagcgggggcaaatttgtagctgctggccccgccaacgagcggggctcattcatatctacgcccgtgtgccggtttcaggcacggcagcagatagcttcgggtgcgcagccagatattcgtgcagcggctggttataggacatttccagttcaccatagttgctgcctgcacggaatgccgaatagttgtcgccgccctgcagcaggtaggagttggaggcgatgatcaccagatcgtcgtcagcgatcggcctgccgtcgatggtgaggtccacgatgccgacggtggccttaaccccggtatgctggttgccgtttccgtcggaatccccgagtgtgcatgtggcgccaccatctccgcactggacgtaccggtatcgcacattcgaggagatgccgagccaccggtgttccaattcaccgtcatcgttgcgatgaaactgctgggcgagcaccgccttgagtccgagtccggtgagggtttcgtgcgcggcgtggaactggagggccatcagactgtcgacctcacgaatcgtgaccttgccgtcctcgtccatatccagctgtttggttctcaggctgccatcgtttgagaatccgaccacgggcaatcgggtgccggcatacacattccgcatgatcgactcccggttggcgtccgccacaagcatgcccaccgatccttcatgtccgacggacgcgcgcttgtcgaaattcgttcccggcgccagagtgccgatcaccgcgttccccgccctggccgcgtagttggccttcgtgtcgagctgccgcgagcgcgctacgctgccgttcgacaccacgccggcggacatccaggcggcctgacgcggatgggcgtccagcccctccacgttgatcacgcccggaaccgcagtggcctcggtgccgttgccgaggttcacatcggccacctggaccttggcatgacgaccatggccggtgatgatcagatcctgcacggccatgttctggccgaagctaccggcctcatagatcggcgcccctccgtcggtgacgccttgttttacggcgtgggtgtggccggtgtaggcgaggtccacatcacgtccgagaccggttgccgccgaggcgtcggcgtgcaacaatgcgaccaccgcatcgactttgcccgaacgcttcagttcaccggccacgcggttgagcgcgtcgacggcacgttcgctcagatcggcgtcttcggtgatctgcggcgtggccaccgagccaagcgcgtccgtgagcgcgcccacgaaaccgatgcgcttgccattcaccgtgcgaatcgtatagtccttgacatggctcagtttgccggtagctgatttattggccgaggacacgttggcgcagagccagtcgatgccgttggccggagcggccacacgattgttgaagtcggccacgctgcgatcgaattcatggttgcccacggcagaaaccgtcagcccccacaccttggccatgtcaagggtgggtttgtcttgcttcacggccgactcatagggcgatccgcccaccagatcgccggtggagacgggaaccatattgtcggggttgtgactgtccgccaaggtgaaggcggctgcgacatcggccccatgttcgatatgaccatggaaatcggtgatgtcggcgatggtcaccgtgcgtgtgccggtggccggatcctcgccggaaaaaggaacggctcctgcggcacccgcgatattgggtgccacaagagccgtcatcatgatgagcgcgacgatgacgcccatcgttctgcgatgtctgcccgccgtgaaccggcggcggttcgtgtccctgttcacgctttcacggtaaacgcgcaggttgaaccgcatgggcttcgcatttggccggcagatgaattcccggttatttccgcccacagcgtctggccgaatcgggccgtcttcgttggttcggcggtgccattcgccaagctcggcggcgcagatggcggccacagcggcgtgttccgactcgcgggagccgaagcacgccgactcgtttgaccgcccgacgggccttagacgggccttattcgctggcgttcagagacatacgaggagccatatgctcggcgaagaagctcagcatcgattcgacggcctcccgggtctccttgagccaaggcatgcccacgatgtagttatggggcaggcattcgcgcggagcggcacgatagtccagcaactcatggtcgatgcccagcttgcgcagctcgacacccagttcgaggctggtggcttcgaggaagtcatcagtgctcgtggccatccagaccggcggcagaccagcattcacgaccagctgagcgagcctttcgaacttcgtccccttcacacgctcaacatagcgcgtgaaacacggagccagctcctcgacaagcccaccggcatcataggcgttctcatcgaacagccggtccagatcggccatcgcggatttgagacccaaggccctcagaccaagcttcgcgggatgcacgtcgagcagggaagcatattcgtcgttgttcatggcggccgtcagatgcagcaccaaggtcacacccgccgaatccccggtaaagaaaacctggttcgtatccagcagatacctgccggaggatttcgacacccactccaaggccgaggccaagtccctcagctgcgtgaggaagtccaccgcgggatacaggggatagctcacggacaccacggcatacccatgacgggcaagctcgatggcatgcgagcggttaatctccttgaagccatagaagtacgcccctccatgcacctcgaagatcaccggaacagccactccgccacggaccacggcatcacggggcaacagcacgtccaacaggtgtccacgcgtcgcgtccggcagatatgggatgtcgccatacagcaccacatcatccggaatctcacgcttgaatgcataccgaggcaggtcgttatgggcaaaattcgtacgatgctggagcacgtcagcagcgatggccggatcgactccctccaaatcctcgtcgaaatacgtccaggtttgcgcgaccttcttctgttcttcggtcagaccgtcgttgcgctcgaaaaggaatgcgtcggcgccttgcagatcggtgatcatcaaatctccgccttcatatcctcaagctcaacgcccttggtctcgggcagcttcttggcgatgaaccagtatccgaggacggccatcacggcgtacagggcgaaggtccaagtcaggccgaggctatcacgcagcggcgggaaggtggtggagacgaggaagttgccgatccagttggcggcggtggccagcgccaccgcaacggcgcggatgcggttcgggaagatctcgccgatgacgacccacatcgccacgccccacgtcgcgcaataggtcaggaagaacccataggcgccgataatcatgatgatggcccacgcaccgggcagctcgatgccgccatcggcggtcatcgtggattgggcgaagcaaacggccaccacgaccagaagcacagccatgatcagggacccgaccttgagcatggcgcggcgaccgaccttatcgatgatcagcatgccgagcacggtgacggcggtggccagcaaagcacgcaccacagcgatggtcatagacgcggactcggtgaaaccgacagccttccacaggctggaatcgtagaacatgatgacgttcgcgccggacacctgctggaacagggcgacgccgatgccgatccataccacggatttgaggccgaaggtcttgccacgcagatcggagaccttgggctgcgtctcgccttcgaggctctgggcgatctgctcgaccgtcgcggaggcgttgcggtcgcccacgacttcgagaagcaccttctcggcgatggccttcttgcccttcatcaccagataacgcggggattcgggcagcgcgaaggtgagcgcgaacatgatgacgcccgggacggctgtggtcatcagcatccagcgccaagtctcgagtccggcccagaacgtcacggcggcgccgcccgagccaagaagataggagtcattgaccacaagggaggccacgatgcccaaggcgatggccatctgttggaagccggtgaggaatcctcggcgtgacgacggcgatatctcggagatataggcggggccgatggctgaggtgaatccgacgccaagtccgcccacgatgcggaagatcacgaacacccagatattggacgccagaccggtgaacagggcgctgaatacgaacagcgcggcggcaagctgcatgacgcgcacacgaccgatgcgatcggccagcgtgcccgcgaaccatgcgccgaccacgcagccgatcatggcgctggacaccgagaaaccgctcatggcggcgttcaacccgaagccggagtcggggctggcgatggcgtccacggcgccgttgatgaccgaggtgtcatagccgaacaggaaaccgcccacggcgccgatggtggcgacggtgatgagcttggcatgcagtttcgttggcacttcattgttttgattcatggattgcctcctttgcctttcatgaacctggttcgatgatagaagcaattcggcgggatggcatcggtgggctgtgacctatcagggacaaagtgtgacctatggtgtgacgccttcgtcacagagccaccagttggaagacgctcacaacgattccgttcaccggcccttcttcggactggtctgtcaatcgtcatcgcagttgtgcgagagctcgatgtcacgccactgcccgggcgtgagaccaaatttacgctcgaaagccgcttggaaccccctttcattgggaaaaccagccacccgtcccacttggccgatgtccgcatcgggcatgcgtagccgttcgcaggccactttgagtcgtaactcattgacgtaatccataaacgaagtgcctgaatattttttgaaaagccgggagaaatactcacgcgaatatccgaagtgccttgccgcttcgctggtagtgatggacgaaagaaaatgatcccgggcatagcgataaatcaacgatatggactgactgtccccgtcgtcaggtccatcaatcgccttcgactgcatgaagtcgtcgaatatcctgcccatcaacgcgaagaacgcggcattggcgttcacatacttcatctgggatgcgccgacaagctggtcgtatatctcatcgcataacggggcaaaggccactcccccatgcctgttgcagcggtcatagtccacttgacgctgcgcctgcagaatccgtggaaggaatgcggacatctcaaccggattgaccgtgacggacaacgcctgcggcgtggtcccccggtcctcatccttcaccatgtgaaccgcatgcacggcctccggcggaattacatgcgcctgtcccggctgcagcacggtcatggcgccattcactacgacggacatggggcagtccttcgcgtacagcacctcaagaccgctatgccagtgatatctcgctttgtcatagctttgatgagctatgaccagcgccggaaactgcgtcgttgataccagcaactcctgcttggagtcatcgacatagcgcataccgcatcctttctccgaatggatatcatctccgaatggatatcacccaaccatgttccatcatcgatgtgctcatcgtatcgacgatccttgccgcaaaacatgaaagccagtcatccggctggctttcatgttggagggaggctacgctactcggcatcgttggaaacgggaccatcgttcgacggctcggactccgtttccgcgggagatcccgcctctccatcgaccgcagaaacagaatcccccgtctcggcctcaggctgttcgaaggtctcgcccttgaaggtgaactcacccagcagaccttcgccctcggcgtcgacgataaccttctgaccgtcttcgaggtcgcccatcaggatcttctcggagatggcgtcctcgatgtcgcgctgaatcacacggcgcagcggacgagcgccgagcagcgggtcaaagcccttctgcgcgagcagatccttggcggcgtcggtaagttcgagcgacatgtggcggtcgaacagacgatcgttgagctgcttgacatcgagatcgacgatctgacgcacctccggctcagtcagctgcttgaaaacgatgatgtcgtccaaacggttgaggaactcgggacggaactgctgcttcagctccgaactcacctgatccttcatgcgctgatagctcgactcggtgttcgcgccgaggttgaagccggtgttggcggctttggcaatgtcgcgggtgcccaagttggtggtcaggatgatgatggtgttcttgaagtccactttgcggccctgaccgtcggtcagatggccgtcatccagcacctgcagcagcgtgttgaagatatccggatgcgccttctcgatctcgtcgaacagcaccacggagaacggcttgcggcgcaccttctcggtgagctcgccgccctcctcataaccgacgtatcccggaggcgcaccaaagagacgcgatgccgcatacttctcggagaactcggacatatcgacgcgaatcagcgcatcctcatcgtcgaacaggaactcggccagcgtcttggccagctcggtcttgcccacgccggtggggccggcaaagatgaacgaaccggacgggcgcttcgggtccttcaggcccacgcgggtacggcggatggagcgggacagggcggacaccgcctcatcctggccgataatgcgcttgtgcagctcggcttccatgttgagcagcttcttggactcagcctgggtcagcttgaacaccggaataccggtggtggcgctgatgacctcggcgatcacgtcctcatccacgaccatcttgacgtcggactcgccttcgcgccaggaatcttccttcgccttgcgctcggcttccaacttctcttggttgtcgcgcagttcggcggccttctcgaagtcctggcccttgatggcctcgtccttgtcggcggcgatcttggcgatcttgtcgtcaagctccttgagctcgggcggtgcggtcagacgcttgatgcgcaggcgggcaccggcctcgtcgatcaaatcgatggccttatccggcaggttgcgatcctgaatatagcggctggaaagctctgcggcagactgcaacgcaccatcggtgatggtcacgtgatggtggttctcgtagcgagaacgcaggcccttcaagatttcaatggtctcggcgatggtcggctcatgcacctggatgggctggaatcggcgttccagcgccgcgtccttctcgatgtacttgcggtactcgtcggtggtggtggcgccgatggtctgcagctcgccacgggccagcatcggcttcaacatatcggaggcacccagtgcgccgtcggcagagccagcccccacgatggtgtggatctcgtcgatgaacagcacgatgtcgccgcgggtcttgatttccttcaggaccttcttcagacgctcctcgaaatcaccacggtaacgggaaccggccaccatggaaccaagatccagcgagtagacctgcttgcctttcaaggtctccggcacatcgccggcctgaatcttctgggccagtccttcgaccacagcggtcttgcccacgccaggctcgccgatcagcaccgggttgttcttggtgcggcgggagagcacgaccataacgcgctcgatctcattagtacggccgatgaccggatccaacttgccttcggcggcttcggcggtcaggttgcggccgaactggtcgagaatggcggaaccggacttgttctgcttgtccgccacgccaccggcgttggccaaatcgcccttgccgtcagtggaggtgccggagttgccgcgaatcatatcgatggttgcgctgcgcagctcgcccaaatcaacgtccatcttaatgagcacctgagtgcccacgccttcgccctcgcgaatcaagccgagcagaatatgctcagtgccgatgtagctgtggcccaactgcaaagcctcacgcaacgagaactccagcacctgcttggcatgcggggtaaaggggatgtgcccgttcggggccgcgttgcccttgccgatcatctcttcgacctgcttgcgggtggcgtccaactccacgcccttcgaggcgagtgccttggcggccacgccctcaccctctcggatcaggccgagcagcaggtgttcggtgccgatgtagttgtgctggagagtcctcgcctcttcctgcgccaacacgatcacgcgccgtgcacggtcggtaaaccgttcgaacatgcttgtccttcctcaattgacattccgttttactctaccgattcacagtgacgtttattcgctggattccatgaattgcgccgtgagaggagaagaaaaacgatatgctggtgcatagattcatcctgtgatcgatggaagggaggctcaccatgagcgaaacaacaaccaaggccgacatcgttgttggcgtggatggttccgacgagtcctttgccgcattgaaatgggcgctgaaggaggcctcactgaccggacagcatgtcaatgccgtgttcggctggacccattcgtgggatatgggttccgaaccggacagcgatgaagcctgggccaaggttcgtcacgacatcgccaacgagctgaagtcgtgggtggagaaggccgcagccggcattgattttgatcccgcgaatctgaagctcacctcggtcaaggccaccggcaccaccgctttgctgcagatcggcaaggattcccagcagattgtggtcggacgccgatccttaggccgtgtggcacgctggttcatgggatcgctgtccgcatcgctgtcggaaacggccgaggtcccggtcacggtggtgcgcgtctccgacagtgaggacgaaacggtgaccgatgccatcgccaacgcgctgacgccggacgaccagaccgtgcatttcgcccagcccaaaccggctatcgaagagcacagccgcccagtggtggtgggcgtggatggatcacaagcttcacgccgtgctttcgagtttgccctcgatgacgcacagctgcatggcgcgcctctgaatgtgatgttctgctggcagttgcgcgatctgggcgttatcccgggctatgaaaatgccgtggcaccggttgaagccgggcagcagcgcgccgaagcaatacttgccaagatgatgtccgaggttgacattcctgaaggaatcaaagtcagcacgaacgctttccacattcctgcatccaagggtctgattgcggcttctcggtatgcccgtcatctggtagtgggttcacgtggcctctccggtctcgatgctcatttcctaggttcggtgtctcgccagattgtgaactttgccgagtgcaacgtcaccgtcgtgcactaatcgaccaaccagcggttatccaaaaaatcatctcgagaattctttgcactgacagttgctcaatgcaaagaattctcgtacaaaaggcttatttcgagaattccttgcactggcaaagcaggtaagacctccacagttgattgcagtcgacttacttctcgtcatcctcttccgaatcggacttagtctgacggagtttttcgatcaaatccaccacggcttcaagtccggaagtcacctcttcagcggtgtccgcggtctccggttcgtcgtcaacatcatcctcgtcctcaccatcatcaacggtgttttcaaggatgtcctcttcggtggcttcgtccgtgtcgggggcggggctttcggtggagatcagctgctcgtcatccgcctcaggcttgtcgctttcatccgcctcatcatcaagttctgcaggttcctgcttgcgaggccggtgggccaccacatcgatgtgcaggtcatcaaaagcgggattggcctgcacccacagacggcttggctccggaggttcaatctcggaatgctcgccgcagccatggtccagcgagaccacgcggccatcatccgggctccacttgttcgcgcatacgccgaacaaacggtcgagctcgcccttaagcggcacgaagaagccacaggtggaacacagattgccttcggccgtcttggtgctcagcgcctttggcccacgaggaccttcgtaccagcgcttggcagcctgtgcgcggcctaatgagctcaatacatggcgacgggtgagacgaaacacctccactgcgtcattgacatcctgcagggatgattcctggacctcgccatcttcgatacgctcgtcatccggattggtgccgatggaatcggtgggagacaggtcggtgggctcaagacggtctttccacggaatccacttgggcggcatcagcgcgtcttcggtcggaatcagggaggactcgttcaccgtccacgaatccaattcctcatcgtgatacagcgttaccgaccactgccatccctcgtatccgcgaatgttcgcgacgaaacgaaaatcggtgacatgatcttcaagctcattggcgacgacaaagtcacccacctgatcaggctcgtcggccacttcaagcagcacggcccgtgcaatggcatgaggatccggtgtcacggcggtttcgatggtgtcagtcatgggtcacatcagtcctgcacgtcgaattgatccgccacggcacgcagcagcgtggccagcttcttgctttcggcggcggaagggtagcgatggcgacgcaacgtgttgccggcaacgtcgagcatcttgatgaggtcctcgcagatggcggccatatcatccgccttaggacgagtggccttgaccaagctggggctggaggcgatcagcttcacatccatggcctgcgggccacgccgaccgtccaccacggaatactccaccttggcccctttgcgcagcgtattgacgccagtaggcagggcctgagccggcaggaacacgtccttgccttcctcactggtgatgaagccatatcctttggctgcgtcaaaccaacgaactcgaccggtgggcattgcgaaccttccttcaatcctcaacagtaataatgaactgaaggaatagtgtacctcacaggtcttgaccacacatcatgaggctgagtcgtctcacgatttacgctcaccgccgaaccacgaggacttctgcttggcttccttggttttgcctgcggtctgtgcggattgggcggcgggcatctgctcgatgggcagcaccacggtgaaggtcaggcctcccccatcggtggccgtggcacagataaagccatgatgggccttgaccacggactgcgcgatggccatgcccagaccggtgcctcccttttcacgggcacgcgatgggtcagccgtatagaatcgttcgaatatctttggtcgggattcgtccggcacgccaggtccatgatccacaaatcggagcacggtataccggtacccagtgctcatcgatgcgcctacttcggcggcctctacgaagcggcgcattgacgcgtcggtagccggtaaaccggaaagctgcttcgggtcaatagccgccggcatcacgccaagagcaatctccgcggatgaatcaatcggcgtgtatcggtgaatattgcccacgatattggtcaccacctgacgcaaacgcgaggcatcaccaggcagggtgatggtcggccagtcaccctcagtaaggctcaacgacgccggatggttcaggtcacgggcgggctcaagcccaatcagcatacggccgatggcacggtccggatcgagggcatgcaaatcatcaacggcatcggtaactagcgaggagagtttcaccgtgccggtcacatcgatgccacggccctcatcaagccgggccagagacagcaaatcttcgacaagcacggtcatacgctgactggaacgttcgatgtgttcgatggattcatcggcacgatccaacgccccaggcatatcgcgttgcatcttatacagttccgcataaccatggatggcggcaagcggcgtgcgcagctcgtgactggcgtcggagacgaaccgcttcatcttgtcggtggtctcttcctgctcgtggaagctgagctctattcgagtcagcatcgtgttcaacgaagcggccagagagccgacttccgtgttctcgggagcggaaggaatacgctggctcaaatcaccggcggcaatcttcgcggcggttttttccatgcgcttcagcggggtcatcgtgtgctggatgatcaatgtggccagagaaccaccaagcagcaccacggcaatgccgaccacgacgcagtaacgggaaagcgtgctgacgatgtcgatctgatcggacaaggacaggccgatatacaccacggccctctccttgccgttctccgtgaacgtcatcggcagaatgcgccacggcgaacgcgcggtactcaccgcagcatgattggcattggaggaaggattggacagtatcgtggtgacggaattcgaggagttcggagcgttcttggaacccgaattgccggcatcgttgcccgcgtcgtcttgcgtgttcggatcggtctgcggcttggtcgtattgttggaatccgaagaattgttctgtatctggacaacctgcttgaccacagcctgcgtggtgaatggctgaccgaacgtgatgtctgaggtatcgccgtcggtgggcagcaccggcacggagacgatgccgtcctgcagctgaggcatcagcggcgtgaccaccagcgggttaccctcattatccaacgtgccgtcggtgtattgaatctgcagaaagtacgagtttggcccggcattgtcgtttttggcaagcgtcacgatattctcgaacaccatctggctctgcgatttgagctggttgtcggttttgctcaacatatagttgctcaccaacgcgcggatggagaaggaaatcactgacaccccgatcagcagcacggcaatggtgcaggccacaagcttgctgctcagggagatacggtcaaaatgaccgaagaacatgttcttcttgcgattgtgatgttctttcatgcgtgtgaccgcctccggggcggacgcacgcatactgggccgtggcgacttatcgggctcactcatgatggctggattagttcttcggttcgcgaatcatataaccgatgccgcgtttggtctcgatcagcggcgtcaccttgcgcttgccgccttcgccatcgtcgacctcgatgccatcgaccttcttgcgcagatacgagatatacgattcgacaattgcggcgtcaccgccccagtcgtactgccagacatggtctaggatctgcgccttggacagcacgcggccttcattgtccatcaggtagcgcagcaacttgtattccgtggggcttaaatcgatgggctgcccggctcgcgatacatcatgcgagtcctcgttaatctccaagtcggccacacgaataatcggatcatcctcaacctgttcgcgggtgcgacgcagaatcgcgcggatacgggccacaacctcctcgaggctgaatggcttggtcacgtagtcgtcgccgccaacggtaaggcccatgatcttgtcctgcgtgtcatcgcgtgcggtcagaaacagtacgggtgcgtcgatgccctcctgacggatgcgacgggttacggtgaagccgtcaatgtcaggcagcattacatccagcacgatgaggtcgggctgtaccttttcgatgacttcgatggcttcagaaccggaggccgcggtgttcacctcgaatccggcaaaatgcagcgaggcgacgagcagttcgcggatggaaggttcgtcatcaacaacaacaatcgatgcttcaataggcttactcacgtactccagattggtctacttcactggacgtttcctgaatgtcctcttggagttcgtccgcagattcctgcccgtcttcggaagcctgctcgatttcggcttcggaatccttcttgacttcacggcgacggcgaactatcaccatcaccacaacgagaacgaccaaggcggccaaagccacgcccatggcgatcacgccaatcgtcaccgtggaggatgaggtggatgtcttcttggatttggcgatctgacccatcatcgccgtggctgccccggaccaattcggtgtgctttccatcagctgctgctgcgcggcttcggatagcgcatcgacggttttctgttgcttgagccattcgtcggaattggaggataccgccaccacgagattgccatcgttggcggcgacggcgagcaacacggtgtttgccttcggcttagtggactccagcaccgtgctcgcccatttctgcggtgtctgctcactgttaaagctggacagatacagcaggtgcacatgcacgccggtttccttctccgtcttggctatggcatccgagacctcggtggcatgtgagccgagcagattctccgtatcggtgatgttgtcggttatggtcacgctgctgttcgcgtcggtacccgtgctgctggaatcatccgcatacgcgtccgcagttatccacatcgatcccaatacagtcgcaacaaccacggcaatggcgcaaacaagccgttggaaggcctttgcgcttccggaaaaacggccccgtaccgaagctggaaccacaatggtcgtttttccatctgtccaatgcaaatctgtcatattctccaccttagcggccggtattggcaataacggtcgtcatatcagcgctcattgttttaggaaaggagcaacaatgccccaatatcaagtggattcagaacaaatccaagcctcttcggccgcggtgaacagctcgattgcacaaatcaggcaagccgtgggcggtatgtataccaatctcaacgccctgcagaacgtatggcgaggttcggcggccacccaattcaccaccgtggcggctcaatggcgagcggcgcagcaacaaatggaggcttccttggagtccattcaacgtgcgctggcccaagcctccaacgtctatgcagacgcggagacgcaggcatcccgtttgtttgcaggctaagcgtcatcataggcccgcgaagcgggtggggatgatcctctacgcatgcttcgtgtaaccacccccagtcggctgcgctgacagcccccgccatcggggggctagtgcgcacaagatagcaagaaggggaactccttgtaggagttccccttctctttgccagctagcaactagtcgcgtgcgaatcagtagcccatgtcggcaccggcggccggggcagcggccttcggctccggcttgttggcgacgacggcctcggtggtcaggaacagaccagcaatggaggcggcgttctgcagagcggaacgggtcaccttaaccgggtcagtcacaccggcggccagcaggtcctcgtaggtgtcggtggcggcgttgaagccttcgccatcgggcagagaacgaaccttgttgatcaccacgtcgccggacacgccagcgttctcggcaatctgcttgatcggggcttcgatggcgcggaacacgatggcggcaccggtagcctcttcgccggtcagggaggtgacggcctcagccttctcggccttggcagcagcctgaacgagggccacgccaccgccgggcagcaggccttcctcaatggcggccttggcgttacgcacggcatcttcgatgcggtgcttgcgctccttggcctcgacctcggtggcagcgccgaccttgatgacagccacgccgccggccagcttggccagacgctcctgcagcttctcacggtcgtaatcggagtcggtgttctcaatctcggcgcggatctgagccacgcgagcgtcgatgtcttccttggagccagcgccctgaacaatggtggtctcgtccttggagacgatgaccttcttggcgtggccgagcacggaggtgtcgacggattcgagcttcaggcccagctcatcggagacgacctgagcgccggtcaggatggccatatcctgcagcatggccttgcggcggtcaccgaagcccggagccttgacagcgcaggacttgaaggtaccacgaatgttgttcagaatcagggtcggcagagcctcgccgtcaacatcctcagcgatgatcagcagcggcttgccggtcttcatgaccagctcggccacgtgcacgatgtcctgctgggaggagaccttgccggaggtcagcagaatgtacggatcctcgagcacggcggtctggtcgtcagcgttggtgacgaagtacggggcaatgtagcccttgtcgaaacgcatgccctcggtgaagtcgaggtccagaccgaagcggttgttatcttcaacggtcacaacgccatcctggccgaccttgtccagagcctcagcgatcttctcgccgacctcggggtcagcagcggagatggtggcggtagcagcaatctggtccttggtctcaacgtccttggcggcaacgacgagctccttgacgatgacctcggtggccttctcaatgccgcgacgcagcgcgatcgggttggaaccggcgaccacgttcttcagaccctcgtgaaccagggactgggcgagcacggttgcggtggtggtaccgtcgccggcgacgtcgtcggtcttcttggcgacttccttgaccagctcggcgccgatgcgctcgtacggatcctcaaggtcgatttccttggcaatggacacgccatcgttggtgatggtcggagcgccgtaggtcttgtcgagcacgacattgcggcccttcggacccagggtgaccttgacggtgttggcgagcttgtcgaggccctccagcatgccctgacgggcttcctcatcataagaaatgatctttgccatggttgtgttgttcctccaaatggctaggtataccagttatcactcgcaagcgccgatccgtggcaaccagccgtcagctgccggttatcactctcgatctccgagtgctaactgagacattagcactcgcccttgccgagtgccaacatgactatcggcgattgcgctttgggcatgaaaaagccccgaccgttacaacggtcagggcttgaagtacgcgtttccttgcgcgcttgctcattcagagcgggcttcaccggaggacagcttgacgacttccttcgcctgcgtgcccttgccggacggggcgggcgtatactccacgcgatcaccctcgtacagcatcttgaatttattggtgctgccgtcgtccttgatttccgcgtagtgcacgaaaacatcctcgccgccgtcgtccggctggatgaacccgaaccccttcttggcaaggaagaacttcacggtaccttgtgccatatctgatctttcctttgttcccttaggcgtcgcgacacaaacctatagggaacgtagaaagaaccgcatcgcgctccccctacctcgcgactagtgcacgattgtaccgtgacgagggaacaatacaaaccgaaacagtaactatttgctcaagtttctcctatgaaagtgaccaccatcacattactgatggcggccacggagaaaagggtactgtgaatgcctagttcagcagcacgacggtgatgggagcggcaagcccctgaacctgttcaacggcactgatgccaagtgtcgaagccacatcttcggcggtggccttgtccgcttcattctggtaccacaccacggtggaggtcggcaccgatccagtcggattcgcggcttccacgctggtataaccagcggtctgcaacacatcggccttctggcccgcgtatccgctgataccggtggcattaatcacccgcacttgggtggccttgttcacagttgctgcggcctgatcctgctgggcgctctgatcggcattatcggtagcggcggaatcggattgagtattcgaggaatcagtattctcggacttggtatcagaagagtcggcggaatcggacttggcgtcggacgagtccttcttttctgtaccggaagtctgagcggtctgcgaggaagtattcaaattcaggatgttcttgtactctccggtaacccaggcccatgcaccgaaaccgcacagcgccgctacgagaatcacgatgacgaacggtgcgatacgcgaaataaccgaacgggaaccgcggtggacgcccaccggccccttggggggattatcgaagacgtcctgctcgtacgattcgtaggtcaccttgtcgcgcgccataaagccgccctcctttatacacaaactacccacgagtgtaaccgccacacgggaaatgagccacttcgccacaaccccatgcaccgtatatgcacgtttgactacagtaatgaaccatgatcaaaccattgagagaactggtagagcccggatgggcaaacgcactggccgatgttgagccgaccatccaccgcatgggcgattttctccgggaggagaacgccgcaggcagaccctggctgccggccagccacaatattctcagggcctttaccattccgtttgattcgatcaaggtactgatcgtgggccaagacccctaccccactcccgggcatccggtgggactgagcttctgcgtggcaccggaggtacgaccactgccgaagagcctgattaatatctataaggaactggtcgacgatctaggcgtgccgatgcccccgaacggagacttgacagcatggaccgagcgcggggtcatgttgctgaacaggtgcttgaccgtgggagtcggacgccccaactcccatcagggcaaaggctgggaagaagtcaccgaagccgctatccgagcattaaacgcacgcgtggacggcaacggcaaaccgaagcccttggtggctattctatggggacgcaacgcgcagagtctggaaccgctgctcaccaacgcctttattattaagtcacctcatccgagcccgctttccgcatcccgaggtttcttcggctccaaacctttctctcgagctaatcaggcccttatcaacatgggtgccgagcccgtggattggagtctgtaacccctccgccgtcagcgtgagtcgttagagtggtgggcatgactttgttccctacgcaaccgaacatgcctccgaagccggccgccgcgcgtccagcagccgttcctacgcccagtgcggcggcgccgctcggcgccgatgatgccaagcgcgcacgcgccttggcagacagcatccgcgcacgctttgcccaaacgctggtcggacaagacaatcttcgtgagtcgttgatcgtgacgctggtggcgggcggccatattcttatcgaatccgtgcccggcctggctaagaccaccgcggcacagacgcttgccacatgcgtatccggctcgttcaagcgcgtacagtgcacgccggatcttatgccttccgatctggtgggcactcaggtattcgattttgcctcgcagaaattcaccacacagatcggccccattcacgccaattttgtgctgttggacgaaatcaaccgctccaacgccaagacccaatccgccatgcttgaggcgatggcggaaggcacgaccactattggtggccagcgcatagccctgcccaagccgttcatggtcatcgccaccgagaaccccatcgaggaagaaggcacgttcaacctgcccgaagcccagatggaccgctttatgatgaaggccgtcatgacctatcccactgcggatcaggaagcgcgcatgctggccatgctcacccgccgcggttccgacatgatcggaccggacagcatcaccggcgagcgcatcaccgttgccgacgtggacttcctgcgtacggccgcacgccgcgcgcatgtctccgacgccatcatgcgttatgcagtcgatatcaccgccacctcacgaggggccggttccaggccgatcaagggattgtcgtccctggttcgtctgggtgcctccccgcgtgccaccatcgctttgattcgcatcggtcaggccaaggcattgctctgcggccgcgactacgtggtgccggaagacatcaaggcctttgcccacgaagtgctgcgccaccgtatcatgctcaccttcgaggcattggctgatggtgtggtcagcgatcagatcgtagacaagatcgtcgaaacggttcccgttccgtgagttccgcttccgtccgtaagaagatagaggcccttggcacccagatgagtctgcctaccgtaaggaaggcattgggtgtgttggagggcgaacacgcatccggccgccgtggcggcgggggtgacgtgatggatatgcgcgcctatgagccgggcgacgagtcccgtctgatcgactggaagaccagtgctcgtcagggtcgccctatggtggtgcagcgcgaacgtctgtctacctcccgtgtctggctgctcatggatgtgggccgtgagatgaccggcatatgcccttccggagaacagacatacgaggtggccgccaatgcgttgcgcatgttcgccgcgctgtcgatgcgacgcgccgatgacatctctctggtgttcggcgacgagtcaagcatcacgcgcattccattcaatggtggattcgcgcagtttgaacgcacgttggataccgcattgcgccgcaactggaaccatgggcgcaatatcgatgcattgctggaatatgcacgccgcatcaaagaccacgaagccctcatcgtgttggccaccgacgagcatgcgatggccgaacgccacatcatacaattccgtcgcattgcccgaacgcatccggtggtgctaatcgatgtggccaccttaaacccgtttttgccggtatctcacggtcatcgtgctcctctggatggcacgaccggccgccgtgtgccggcattcctgcggtcccggaaaagcgccaatgaggtttccactcatcgtgaatacatggccgcagcgttggagcaggaactgacccgtgctggctctcacatgattcgtgccacttccagcgaggccatgttcgatcgctttgtcacattggtctcccgcgcactggcaaggaccacgcgcaaccagcttggttccgcccccgacctgatgttggcaggtagccgatgagcaataccgttattctcgccgttgaccccagcgatctgcagacggttgacgctttgactttggcgggaccattaaccgccctcgtggcggtgtgcctggtattggccgtggtattggtgattacggtcatagtgatgtcccgcccaaggcgaaactccgcaaaagccacgcagccaaggggcgcacataatgaggcgggaccaaaggccacatggcatgcccacatcaacgacgtactgagccgttatgaatccggaacgctcaatcgtgaagacgcgtttgtggagctggctcttatcgcccgtgatttcgcaggtgcttccagcggcaaacgactggaggccagcacactcgccgatttgatgcgtctgccgcgcacaccagcgaatcgtcaaggtctggatacgttgcgtcacaccatcgaagccctgtacccacctgaatttgccgatccttcgttgaacacgctggccaagagcgttaccgtgaaggaagctgccggctgggtctcgaatctggtggaaaggtggcgatcataatgttgtcatggcaatggccttgggccgctcttgccggcgttctgatcgccgcagcgatcatcctgttgttcgtcgcattctcccgtcgaatcaagcccgcggacgaggcagtattttcgctggacgatgatctcaacaccgagcatgcgtcacgtctgttccgccaatggcgggcattgggacgactggcagtcgctctcttggtgatcgcgctggtgctggccatcgcgttggtggcacgcccctcccaagtcgattccagcgatgaacgcgcctccagccgcgacatcgtgctgtgcctggatgtctccggttccacactgccctacgaccgcgaagtcatcgacacctatctggaattggtgaagcattttgagggtgagcgcatcggcatgagcatcttcaattccacgtcacgtacggtgttcccccttactgacgactacgaactggtcaccgagcaactgaccgcagccagcaaggcgctcaagggcgtgcagacacaggacgacatcgacaagatgtcagacgctcaatatcagaaaatctcggactggctggaaggcacgcagaaccgtaaggacgccacctcgcttatcggcgatggcgtggtctcctgcgcggccatgttgcccggcttcgcctatggtgccgccaatgaaacgaacgccaagcgccaacgcgcggcttccatcgtgctggccaccgacaatatcgtctccgggcaggaaacgtattccctcaccgaggcgctggacctgaccgagcagaccatgattaccgtcgatggcctgtactccggcccgaaaaccagcgagtccgatcagaccaccgccgacatgaaatccgctatcgaagctcatggcggtgtgttcctcacccaatcggatggcgcgtccgtcaatgaattggtacgtgatattcagtcgcgcagagacaccgagtccgacaaccagtcgaaggcatccatgacggacgcccccggactgtgggtgctggcgctggccgtgattcttattatctggattgcatgcacctggaggctgagacgatgaacggattcaccttctcccccgccttgggatggcctgttggcggcgctttggcagccatcgcattggtactggccgtggtcgaaatcgtgcttttcgttcgccgccgtcgcaaagcctccagcgacgagaccattggcgccaccattcgccgcacattgatgctcgtgattgcggcaataatgctgctgacccccagcgtggtgacaccgaccacatcccgagccatcaatgccactgatgtgattgtggccgtcgataccaccggctcgatggcggtggaagatgccacatacggctccaccgaagccattacgcgtatcgacgccgcgcgaaaggctgtgcacgacatcacgtcagcctatccgaacgccagtttcgctgccctgcgattcggcgcctcgggcaccttggacgtaccgcttacgccagatactccgaccatcaacaattgggcggacactctggctgtcgaggccacctccgtctccgccggatccagccttgatgcgcctatcgaccagttgctgctcaccgccaaatcaatccgtgaagcccacccggacgatgcaatcgtgctgtatctcatcactgatggagagcagacctccaacgtcacccgccgcaccttctcctcgctgcgccaatatctcaatgacggattcaccgtcggcgtgggctcgacggaaggcgggaagattccggtcatcgctgatggcgtgagcgccgccgacgcgaatgccgccgaccagtgggtcaccgatacggataccggtgaagccggcatctccaaaatggacgcgcagaacctcaaggacatcgccgacgaaatcagcggcacctacgtgcccgtgaatgcttcatcggccttggctgatcaggtgtccgccaaggcctcaaagcaatggcgaaccactgtcaccaccaaaaaacgcactcgcaccactgcagtggtctggccgctggcaatcgcactggcagtgctgttggcgtgggaattcggcgcgtggatcgccacatcaaggagactgctatgagcacaggcaagacttctcgaaacgcccagcccccctttggcgcgcgcatcgcattggccatcgccgctgcggtgctggtactgattgccggtgtggccggggctaacctgtctgccaccgttacgttcaaccgggccaccgcatcgctgaaggccaatatcaaggccgctcaggacgagtccaccgacatggatacgctcaacgcccaacaacagcagaccgatgcccaattcgccgaggccaacagcatgcgcgcggtgctgctgccgcagatcaaagatgccatcgatgccaatgccgcagcctccgcacagctgacgaagatcaccttgcaacaggtcgaggcacagcgcaacggtacggatgcccagaacagcaccgatgcacaaagctcaagcacatcgaacggcaacgccaccaagagcgggaatctgaccgatgagcagaaaaagcaggtggaggagctgatgaaggccaaccagcagtccaccgacacgcaggcgaataccgatacttccaatcagaaagcggaacagaacgcgggcagcggcgcttccaaaccatggtaatgggtgatgggtgcgccatccatatcattcatggtgattgtggataactgactgctttcggcaagctggaaccacataagtcgtttcggctggacatgggcgtctccaatccttttagctgggtatatgaacatacccggtatcaatccaacaccagcaggtgtcgccggcaattcggcggcaccgttcaattacggagtctgcccctgccatgcggcagtgcaacgcagccgtgacctcgttgcgacgcaacgagcctccaccatcgcaacgatagatcgcactgcggccgctatcgtctgctcgaaagacatcgcgtgggccggaccggcgtctgaggaattccgctcccgcctggacgaatttcggtccaaagccgcactgttggctgacgacatggaggctacccaccgattggtttgggggtcggcatgacgaacggaaaccattactggcaggtggaagccagcatttacggtggagccggctacgcgccagccacacgcaaggaatatgcggctatcgccaaatcactggagagcgaagccgccgcactcgaagcgtgtgctgcttcgtgggatgcgggagccttgcaattacaggcacaccgttccagcgcgccgatgtgccccgcactatcaccagggaacccttcgacagcctacgctcacacctcgctgccatatgcgtctgtgggagcacggtgcactgaacatgcggcgatgtgccggcagttcagtcaagatcttgccagcaccgcacagctgctgattcgcgcgcattcgctgtattccgatgccgagctggttgctagacgggtgttcagtgaaacgttgcaggccgccacccagcggtaccctcaatacgcgctgctcggcttgggagccgtagccgccggtggttttctggccggatgggccattgatggcaaaccgaaccctgtgtggatgtctacggccacctatccgttccaggagggagtattaagcggttttggtgcgatgctcggcttcgtgaggccgggacagggcatattaagcaccaatgaggtcaataaaggcgccggcaccatcgcagtattctcagggccgctcaaagatctcttccaagggaaccagctcactgtgcaggaggtgcacaccgacgccgaagtcgttcaggcaagcagctcggtggccgaatcaatggagaacctgaggcgactggcggaggaacggctcggaaaaatatcgctcgacagcggtttggaatacggcaccatcgcgattcaacgatacaaacgctccgatgggacgaatgcctggctcgttacgattcccggaaccgacgggcaagacgattccccgtttggttgggaacagaacatagagctgatgagcgcatacgccttgcgccgcaggaaggcggacagcgcgcggatggtcgccgaagcaatgcggcaggccggcatcaaatcggatgaaccggtggcccttatcggtcattcgcaaggaggaatcgccgcggcggccatcgcctcggattgggcggatcaatacaacatccaacatgtggtgaccgcaggctcaccgatagcgaaccatccgattccggaacgaacttgggtaaccagcgtggaaatcgatgacgaactggtagccgcattggatggtgccgccaatccggccaaggcccattggctgacggtgagcggccatgtcacgcctgcaccggctcctacgccaagcactgttgatgcagatggcttctgcacaccgggaagagtatccatcgcaggccataccccatatgatgcggcacaggtttccggcgagcccaccgatggccgtgagatcagccactggctcaagtaccatcaggccgcttaccggaatgcctccgaccttggctcccccgccgtgcaacgccacgaagcgcacttccagcacgttatcgacggggagctcaaggagacccgctattaccaaggtcgcatgtctcgggcacaggcatcaggccatggaggacggtaagccctccatgcggagtaatcccccagtcaggcgcgacgctcgatgagcgcgcggccggaggcgagacggtcgagcacgccggttttggcgatggcgagcatcagataccaggccatcacgccgctgatcagcacgccgccggtgatttccgaaatcatgtgcacgatgccgcgcgggctcacgaacgacacacccacatagcggaacagcatgagataaatgccgtattccaaggcgaccaacgcaccggacgcaatggaaatcggcagattgaacatgcggtaacgcgtcgcggcaaatggaagctcggcaaacacgccctgcagcaacgccgaaatgatgacgaagcccaaatcgaactggctgccgatcaccgtttcaaccaacgtgccgacaaggttcacgtacaatgccgcaccgggcttacgcagaatcagcacagccagggtgccggagaagtaccagacggcgtgcacgatgctggcaaagccgggaagaatcgcaccgaacaccgaggagatcggcatgtaggcaaagttgaagccccagaagattacgccgcaggccgcgcccagcgtagcgccgaccgcaatgtccaacggctgccatttcagcgacgatacggcgactggacgtttgggaagagtatggatattgacggtttcgggcatggtaatctccttgccttaagggccgcacacagtaatcggatcggggggcgttccttgacctgcgcggctcgggcgggaacgccacaccacagtatagccgctcggttcacggctggaagtacccttggaggttatgaagcttaccgatatttcccccgcaatcgcattgaccccgcttgacggccgctaccacaaggccaccgctccgctcgttgaatacatgagcgaacccgccctcaaccgtgaacgtatgcgtgtcgaagtcgaatggatgattcttctggccaacggcttcgagggcaacggcaaccagccgatcgttgacggcgtcaaaccgttcaccgaagccgagcagaccttcctgcgtgccattcccgaggatttcggcgctgagggcatcaagcagcacgccgctcacgaggccatcacccaccacgatgtgaaggctgtggagtactacatcgacgaccagatcgacaaggctccgaccgagctgaccaacatcaacgatgagctgaagaccctcgtgcacttcgcctgcacgtccgaagacatcaacaacctcgccatcgcccgttgcgtcaagaacgccatggagaacgtgtggacccctgagttcgagcgcatcatcgatcaccttgccagcaaggccgaagagttcaaggacatgccgctgctctccctcacccacggccaaccggcaacgccgactacgctcggcaaggagctcgccgtctacgtctaccgtctgaaccgccagctcaagcacctcgaaaatcaggaatacctgggcaagatcaatggtgcgaccggcacgttcggtgcccatctggccgcctgcccggatgtcgactgggtcgccgtctcccgcgagttcgtcaccaaccgcatgggactgacctggaaccctctgaccacgcagatcgaaagccacgactggcaggccgagctctactccaccgtctcccacgccaaccgcatcatgcacaacctgtgcgtggacgtgtggatgtacatctcccgtggcgtgttcgcccaggtgccggtcaagggcgccaccggctcctccaccatgccgcacaaggtcaacccgattcgtttcgagaacgccgaagccaacttcgagatctcctgctcgctgctcgacaccctctcagccacgctggtggaatcccgttggcagcgcgatctgaccgattcgaccacccagcgcaacatcggttccgcactcggctactcgctgcttgccctgaccaaccttatgggcggcctcgaatccatccacccgaacacccacgtcatcgagcgtgagcttgacggcaactgggaagtgcttggcgagccgattcagaccgctatgcgcgcttgcgagctcaggggtctgccgggcatggacaagccgtacgagaaagtcaaggagctcatgcgcggtcacaccatcaacaaggagcaggtcgaacagttcatcgaccagcagtccttcgactcggaaaccgccgctcgtttgaaggctctgacccccgccacctacaccggcgtggccagccagcttgtcgccttcgatcgctgagcccggctcaccccgcacactccaacaccatcgaactgaaccgaacaaggacaggcgtcaggtagctatttcatgaccactgaacaggatcagtccactacggaagatcgcccgagcgaggcatcttccttcacctccgaccggccgattgcctctggcgacggccggtcggccgattatcccgtcgaacagtcggactcttccatgaatagctccggcaaaggctctggaccctatatcgacgacatcgccccacgccgcacccgcgattttggcgatctgacccgcgccgggctgtcgttgctcatggcagcggtggtcatggtgtttgccgtataccttggcggcatgacccgcggcgtcgaatccgacgcccataccgcagccacagccattaattggttggctgattttccctcaaccgtacttacccagctagccaccatcgtcatcgtggtaatcgtgctggcgcaattgctgatagcccgggaatggctgcaggccgcggtctctgccttggctatgtttgccggctatggtgtggcggccgccatatccatactgattagtggattgcatgattacacgctggcactggctttggtctctgccgccacttccttcgggtcggctctgctgcccagcatctatggtggcatggcggctttcctgactgcggcaggccctcgtcgaacccgctccacggtcaagtggggatggaatattctgtacgccaccgccgcagtgatggtcgtcctctcctggcactccgtaaccggcatgctggtttccatggcagccggccgtgcgatgggcatgcttatccgttttcttatcggcacgcaaaacaaaggcgtgtggggcgatgagcttgttgccacattgcacagcatcggtctggatacggcatcgctgattcgccatcaggagttggacgacggcaagggcaaatccttggccgccacattggacgacgatctgaccgagggatcgcgcatttatgatctcgagaccacggataatcgccgtttcatcgtctccgtcatagacgcgcagacgcataccgccggctatctcaaacagctgtgggactgggcccgattcaccagcgtgtccattcgccgagaccgttccgtgcgagacgccgtccagcatcatttcgccatgctgctgggattacacagcatcaatctaccggctccgatcgtatatggcatcgccgataccgatgagtccgccattctggtgctggatgcgcataccatcgaaatgcccgccaatctcaataccctgaccaaggccgatgccgtggcgtatatgcgctacttgtccgtggcgaatcgcagaggttacacgcaccgccgcatcacccccgatacgcttgcccgactcgaggacggcaccgcagtaattgccggttggctcaacggcgacaacgcctccgcctcggccaacaccgcactggataaggtgcagctgctcacactgttcgctgcgctgatcggcgtggagccgacgattgaagcggcccgggagacttggggcgacgccacgctgacctccctcgtgccattcatccaaaaagtcgcggtgccctcccccacacgcgcactggacacgtgggataagcagctgctcacagcattgagaagccgtatcaacgccatggccgatgaagacgttgtggaatccaccgaaccggcgacgcttgcccgattctcctggcgctcgatgctgaccatgctgctggtcatcgttgccgtagtggtggtgttcacacagctcaatcccgaagaaattatcactgcgctgtccaacgccagcccgttgatggcggtggtcacgctgctcttcagtgtttgcggatggattggatcgtcgatttcgctggggtccttgatagatcgtgataagcgcgataatacgggcgtgttcatgagtcaggtggcgggtggattcgccactgtctcaatgcctgcaggcgtggggccctcgttcgtcaatctgcaattcctgcgcaaatcgggatatcggaacacccaggccactgcgattatgagtgcggcgctggtggtgtattacgccgtctacttctccatgctggtgctgattggcctgttcaccgggcgtagcacgttctccggttcgattccgaccaataccctggtcattgtgctgggagcagtggtcgtggtgatttccgtggcgatgatgattcctccgctacgacatctggtgacacgccgtctggtacctctggccaagacctatatcaaccagttgctggacgtactttcccagcctcgtcaactgaccatcagctgcctgggcgcattgttccaaaacgtgacaaccggcttggcattctggtcggcgttgcaggcttttggccatgcttccaaccccatagagacgactttcgtgttcatgctggcatacgcactcggttccgccgttcccacccccggcggcctaggcggcgtggaagccgcattgacattcgcattcgtggcggtcggcgtgccacagggcgtggcattgtctgccacactgctgcatcgtgtggtgttctactggctgagaatccccctcggagcagctgccatgaagtggctggacaagcacaatctcgtctgatttttgcccttgccctcccctcgaaaaaaacacataaatcctatataaaatgcgggttttcgcagtcacatgcgctattatcattgattgaacgggcaaagcaacaaatgccgccccctgaccaagaaggatgctttatggcatacaacaagtctgatctcgtttccaagatcgcccagaagtccaacctgaccaaggctcaggccgaagctgccgtcaacgctttccaggacgtgttcgtcgaggcaatgaagtccggcgaaggcctgaagctcaccggtctcttctccgctgagcgcgtcaagcgcgctgctcgcaccggccgcaacccgcgcaccggtgagaccatcaacattccggcttcctacggcgttcgcatctccgccggctccctgctgaagaaggccgtcaccgagtgacctgccgctagcagcgagagtctcgtagagtgacaacgagatagcaagaaccccgaccattgtggtcggggttctttgtgtattgcgacgcagattagggggggggggctatttaaacctgcacaggctcatcagaaccattcggaagcactcccatcaactgtgtgaattcttcggtcggctcggattcgaatgggtcgagaagcacggcttcgcggcgttcgggagccgccacggttaagtgggtccagtctgcggagaactgggctccggcggcaagcgctgccctgatgaattgaccacgcagggctgcacgagtgtcggtaggcggattgtgcacggcgattgccacgtcattgctcgtcaagagttcgcgcagctggttgcgggaggtcagtgaaccatacaggcggccattggcgatgtcgtggtaatcgagctcaagctgttccaactgggcgaaggtgacatccggtcgacgtttcctgagtgcgtcgaatagacgcttcttggcagcccagtccacacggtcggcgagcgcatcgtattcaccgtggtccagtgcgtccagagcacggtgccactcccccatgacggtcttgattcccgtcaccggcagcgagccgaccaaggcatcatcatgattcgtgataaaggcttcgaccgctgcataataccggcgctgcaaatccaatgcagtcacagattcgcccgattcaagcgccagctcggcatgtgagttgtccgggaaccggctgacggcacggttggcagccgcagggtcagcaaaggcatagtcctcgaatccagaaggaacttcattgcggaaggcatcttcaatcacgcacagcacgaggtgcgtcacggcaagcttcatccatgtggcccattgcgaacggttcgagtcgccgatgatcacatgcagccgacggaaggagtcggggtcggcgtgcggttcgtcgcgcgtgttgaccatcggacgggaacgcgtggtggccgaggagacggcttcgtccaggaagtccgcacgttgggtgatttggaagccgtccggagtcatgcggccggcgccggtgaacagttgacgggtgatgaggaacggcagcagctggtgctcgatggtctccaacggcacaaaacggcggaccagatagttctcgtggcaaccgaaagcgtgaccggcggagtcgacgttgttcttgaacacgtgaatcatggcgcgctcgccgtgagtctcacgcagtttgcgctgcgccttcaaagccagattgcgcatgacctgttcgccggcgagatcctgagccagagcctcgcgcggatctcgtgcctcggcggtggcgtattcggggtgggatccgacatccagatacaggcgtgaaccattatccagataggtgttggtggaacgtgagcgggacacgaccggctggaacatggtcatggccacctggccggcgtccaccggcttgctggcaccggtcacggacactccgtattcggtttccacgccgaaaatacggcagaacccgtccatctcagcggatggcacgggttccgaagcatgcagggagcgggtgccgctgtcacgcagctgaggcatcactcgccacctttttgcacgaagctgttgacgtattcctcggcattggtttccaaagtggattcgatgtcgttgagaatgtcgtcgagtacgtcggactggtcctcagcttggatgtctggctgcacggaagcgagcgtctcatcttcctgagccgccgactgctgggcttgcgactgttcaaattgttgtggcatgttgccttcttttgtgaattgattcgattcgagggctcccctcagtctcgcttcgcgagccagctcccctcagagaggggagccaaggatcccaagacagatcaagtatttatcgctggttgatggaatcgggccaggggtatcgctgcaggtattgccgcagttcgcgaatgatcaggccgttggaggccactacgtcattgtcgtgacgccagtggatgcgttcgccgtcccatcggctcagcgtaccctgggcctcccacaccaccacggttcctgcggcgatggccgcgatgtcccacacgtgcagcatgggttcaaagtaggcatcatacgtaccgtccgcaaccttgcacaagtcaagcgaggcgggaccgacacgcttgatatcggccggctgtcccgcaagagctgatgcgacatcaagggcacgctgagattcgctggggatgaaggacatgccatagctcagcacggaaccgtccagcgaggaggtcatcgagggaacgactttgtcgcgcttttcaccgacagcagtcttatgaatacgcacggctcccgctcccctggcggccaaataggtcaagcccaaggccggcgcatgcaccacaccgataatgggcttgggctcattatccggtccgaactcaaagagagccgctgtcagggtccattcgctcatgcggcgcacatagttgatgacaccgtcgattttgccgatgtaccaatagcgctgaccaggacggctttcggcggggcgtgtggtccagaacccgtcgaaatgggcgatgtcggcaagtctggaactcatgaaacgcagaatcttgctgtcggtctccagcctatagcgagggccgtgttcgccatcgtccgtactgggcagggcgagattgcgtgggttgagctgatcgtgaagggcgtgctggccggcttcctcaagcaatccggcgaccttgagcgccaggttgcgcaggtcctgtggggtctcttcgcgtgtttcttccatagtcatcaagtttaccgttcgccattgatggccaatgccttcagtagatcgatggcgtgttcggctgcgttgagctttgcttcgcaacgtgctttgccataggcgagcggatcggagatgtccaaggagaacaagtgatgatcgggcgcggccatatgccccgcattgccgtagaactcggtcgcctctccggcatcgaccgcgttagggtctcgtgcggtcaggcgagaccaactgacggctgccacttcgacgccaaagcgctccaccaatttggccctcagccatgcgcgggtattttcaggaggctctgtggtggcacgtgcgaggtcggctgcggcgtttacccgctcggtacgcggttcaagcttggcaaacacgctatcccgagaatcgagggcggcccacttcaaatcgatgaccttcagacgagaatcgtcccaaccgttggcggcatcgggggttgccgctccggtgatctttcggcgcaacttttccaacagttgccatttgagcagccattcaacacgactggcctcgccggtcatggtaagacgctgatcggcgtcggcatgacggatggcgacgcaatcggcaagcgcctgcccccacatcgccatgacggaagtggtggacttgtccggccatgcgggttccccggaggtgtccgtgccgtcaatcagcgcagcgacctggtaaacggcttgcctcagcttgagctgaatcagccaggcggtggtctcaccgccattggccagcggcagtgcagcgtctaacgtgaggtcatgtgagacgatgtgcacggcttccaccggatcggccagctcaagttcgtcaagaaaagcgttgagatcaaagccggcctcatcagcatgctcaagcagccacagcagcatgctcgtagtgccaagcttcaacacttgcggcacatccatgcggttggcatcgccaacgatgacatgcaggcggcgatactcgtcggtggcgtgcgattcgtcgcgcgtgttgataatcggccgttcaaaagtggtctgcaatccgaccttggcgtggatatagtcggcacgctggctcagttgataaccgggcatctcactgcgctcgccgattcccacgcgaccggagccggcgtatatctggcgcgtgacgaagtgcagagtcatcaggcgagtgacctgatcgaagggaaccgcacgggccatcatatagttctcgtgcgtgccccagcaggaacctttgccgtccacgttgttgcgatgtagttcgataggcgtgccggtctggctgctggcccgctcggtggcggcttgcatgatgaggtcgccagcatgatcgtagaggacggcctcgaatgggtcagtcgtttccggtgcggaatattcggggtgcgcatggtcgacgtagacacggccgccgttgggggcgatcacgttggtgatattcagttgcggtgcatcggtgagcatgtcagggcgtgccgcagcgcgttcaaggcgggtgccacgcgcatcgttgaccggatcttcctgccggtaatcccatcggatgttcttgctatggctgtctgccgcaccgttgaccacatcgaaagacagttgcaccgggttataacgaccggctccgctcagcgacaccgcatattcggtttcggtgcccatcacacgcttcacactcatggattccataatagacgtggctcccggccttgcctgagcaaagacgggagccacgaggttaggaatgggtcatatacgactgattatgcgcgtgccttttcgcacgctgcgtcacttggcggtggtgtacagtccgttgtcgaactggaagccggtgcattcctcgtattcggagaccatctggttccaagaggattcgatgttgtcggtcaggccgaacagaccggagcgtccgatgacgtaaacatccgggttcgcatcggaaatcatcttccagtgcgccttgttggtggagccgtccatctcgatctcgtagttgtagcccttctcctcgcgcagagcacgcagttcgacgatcttgtcaagcgtcgactcgaggaagcgctggccagcgaaaccggggtcgatggtcatgatcgtgatcttgtcgagcagatcgatgtacggcttgatgacatcgattgaggtctccgggttgagcacagcgccagccttaagaccggcagcgtggatcttgtcgatcatagagaaagccacaccgttggccacctcggaggggaagcagatgtagtcgcacttgacctcgatgagacgatcgacccagaagggggcgtccatcaccatcatgtgggcgctcatcggcacatcggagatcttgcgtacctgttccacgaaccagggagagagggtgatgttcggcacgaagtgaccgtccatcacatcgatgtggaaggagttgaccttgtcattgaggaaagtaatctgctccttgaactgatcgagatccatggtcatcagggacggtgagagctgaatcttgcgagtcattactgcgcttctttcttgagtaatacgggatatttccaggtttttgggcataagaaaccgcgcgccggtgccacagaccttgtgattccggttggccggcgcgcggccttactctgttgtgatgattacggtcagttactgaccgatgtaacggtgtccgctatctcgcggtgccaatcacatgaccttgatgtcgtcgaggtcgagctcctcttcctcggcggaggaggactgcactgcatcgagctgatcggcggggatgtccttcttgatcagtgcgtagaccacgccggtgacgaccacgttggcggcgatggccagcaggccgacccaccagttggcgcccatggtcggcagcatgaggaagccaccgaacggaaccgttgcaccttcgccgttggcaagggacatcaggattgcaccttcaacgcagccgccgaggccagcagccacgatgccacgcaccaggtcgttcatcacaatcgggatggtgccttcgacgatgttgaccacgcccatcggcacggaggacttcagggtctcgacctcttcgcgggtgtagatgttcttgcgcagcagcttggcgacaaggaatgcgaagccgaagccgatcggggtggcggtgttggtcagctgcagagcggtgacggcgccgttgaggccttcagcctgcagggtcagggcgaatgcgaacgcggtcttgttgatcgggccgccgaaatcgacgatggacagggtaccgatcacagcaccgaagatgaggttggaggcaccggacatggactgcagcaggttggtcagccagctggtgaaccaggagaccggggtgccgatgatgtagaccatgatcagaccggagctcagtgatgctaggaacggcacgatcagagtaggcatcaggcccttggcccagctcggaaccttcacgaacttgatgacggccacggcgatccagccggcgacataaccaccgatgatgccgccgatgaaaccggcggagatggagttggccgcgagacccaccacaaagcccggtgcgatacccggcttaccggcgatggagaaggcgatgccggtggcgatgatgaccggcagcatgcccaaggccttgccaccgagggtggcgagcgcttccaggaagttgaacttgcccatcacaagcgagtcctggctggtaccgccgaaggccataccgatggcaatgacgaaaccggcaccgcacacgattggaatcatgtacgagattgcggtaagcaggtgccccttaaaattggcagccttccagaaattcttcattgaaattcctccttgttttcttatctctattgctataagcgcggaaagcgattacttttcggcgatttcgtgaagcttggcgatgagcttgttcggagccttgatcgcggtctcggtggagaccttgacgaccttcttgccggcaaagcgctcttcgttggcgatcttgatatcgatggcgagaatcacaatgtccgcgtcggcgatgtcctgggcggtcagctcgttctcgacgccgatggtgccctgggtctcgatcttgacctcatcgcccgcggccttggcggcatcttcgagcttctgctgggccatgtaggtgtgcgcaatgccaacggtgcaggcgctcactccgacgatcttcatgatgtactcctttgttgtgtttattggttgctattggttcgggaaacggttcagtcttggaacgcggcgatgacctcgtcggcatccttggctttaagcagcgcgtcaacgacttgctgctgggccatcttgcgggcgaacatcgagagcagcttcagatgatcgttcgcgccatcgccggaggcaccgacggtgaacatgaccaccagcttggcgccggtgtcatccaaggattcccactcgatctcatgatcgagaatcgcgatggcgacgccgttgcgggtcacagtctcgctacggccgtgagggatggcaatgtgattgccgatgccggtggcgccttcctcctcgcgcttgtgcagtgcatcgaggaagtcatcgacggaagaaacgtatccttgttcaaacaagcgctcggcgagcgtgcggaacacatcttccttggtctcgaccttgacgtcagtgagaatcgtgttgcgatcgagaacgtcgttgagggtaagggttgcggtgtctgccactgtggttcctttctcctagttgttgaaaaaaatcgtttggttcctattggaaaatctgggttactgactcttggctgccggtactgaacacgttcagcaccgcatcgtcggccagtgaggtgaagaagcgtttcacggcttccccatcgtccgcgctcggctgttcgggcaccacggtgaacacgaaccgatccactgctgcgccttcactccaatcgagaagcggttcggcgagtttgacgtagacgaacgcgccttcagtaaccgccgggcatgtggcgtgcggaatcgctgtgttggtggcaataagcgtattgcccaaatcttcgcgggccacaagggcttcgaccagcgcgtcttgctcgccgaatgacaccacgccttgctgggcaagagactcagccacgctggagataagcgtgtgcttgtcgttggcggccaatgccggctcccataccatgagtcgtttcatcgtcccatcgcctccctgcggatgcggttggcttcctgttcgagacggtcctgatcctcggtggtgagcatcgcggacaccaccaacgtgggcgctgcgacttcatccggcaggcggacggtggaaacgaccagatcgatatccgagtatttggcgagcgtttgtgccagattgcgcgacgacaccgtttccacaatgttgaacccggaaaagcgcttggcgatcttggcctgcaatagctgcgcggtgcccaggcccgttgtgcataccagtagcaggttgagcggcatcggagcacgctccacggcctgcgcgaaatgcacggtgatgaaaccaagctcctcatcgtcgatgcgggcaagcccatggcggcgctccagctcgcggcaggcatcgctcaccttgctgaacaggtacgggtattcaagcttgatttgctcgagcagattgttggccacacgaatgttgttgcgcaagcggttcatcagcggcttcatatgcagcgacaggtgagcgaacagcgcctgcttgtcgatggtgcggaaggccgggtcttcggcgacatgatcgatgagttcataagtcaactcgcgcacgtcatcggggatctcgtgcgggtcgagctgagcgaagtcgatgcgcgaggaagtgaggtactggtacaggtagtagacctcgatacgcggcagtgcggtgccgaggtaggcgtcgaagttgccgatgaccttctcgcagacctgcgtgatctcctgatggtgctccatcagcgcttcgtcagcgttgccctgctcgccttcgtcgatcaatgccccgacgccgcggaagcgttcgatgagaatgtacaggtgggtgaacaggttcacgctgtacgggtaaggaacctgtgcgtgggtgaggtcctcgatgaggtcaagctggtgagagacgaatgccacgtcacgctgctgcaccgtatggtcagcgtgcatgaactgaccgttggcgatgtcatcatcagtgaccagcaggctggccatcgcacgacggatgtcggtttcggtgccggacacccaaatgacatcggcgctgcgggcaagatccaaatcgaacttggcaagcatgctacgcaaggtgcgcacatccaccgcgatagcggattcgctgatgtagaacttgccccacagatcattgatgcggtactgctgcggagcggtgatgagcagacgcttgatgatctcgtcgcggcgttccaccgagctcagcacaccgggcttgccggcttccgcgttgaggtctcgctgggcgaagtaattggaggagttgaggcgatagccgcgaccgcgctgcgattcgatgatcatgccattcgtggactgttcgttgacatgcttgacgatacgtgacacggttttggtcgacacgccaagtaccgcggacagctccgttccgggaacgaaatcacggcggttcaacaggtagttgagcagtgatttattgtagccagtcgccattgccttgcctccttgacatattccaatgtaaggggaacacggaggcggactgccgttctacggacaaactgttgtccgttgtctacggacactgcctcctgtccgtagacaacggacatcagaccatcagccgctccgagtagcgctgccgcacgaacctaatatgagagttgagggcggttttccgcctttgcacctgatgcctgttcaataggtctcatgaatctcatgaaaggaaacgcgatgaagggttggcctggagaatcgaagctgaatataccgttcaatgaagtgatcgcctatgacgccgctgcggctcatgccaggcagccgatcgccaacgtcatctttgatttcggcaatgtactcgtcgattgggatccgcaggcgctgttcatgccgcgctacagcgagaagcgtatcgaggattttctcgacaatgacatatccggcttttacgatgcctgcgacaggatggatgcgggagccagcccggccgagggtattgcgtggatacgtgagactcatggcgaacgctgggctgagatgcttgcctactatttcgataatttcttggactcacttaccggcaccattcccggcatgcgcgtactggtgcatgacatcaaggccgccggccttggtgtatggggattgtcgaattggcaacgggagaccattggcgaggccgagaacgcctatgagattctgcgcatgctgaatggacgcgtcatttccagtgaggtccatatgcgcaagcccgatacggccatttatatgaaagcgttggagtcctttggcattgatgccgcgacaaccgtgtttgttgatgacagggcgtccaatgtgatcggcgcgaaccgtgcggggattcgctgcatccgtttccgcgacgagcgcggactgcgagagacgcttatcgatgccggagtgccgattccggcggtcgccgaataggtatgtgatcgttccattgtgcggctgacttatggctataactcagccgcacagctgattcaacgccctactgcacggattgcagtgactcgtccagcgtcgaaaccattgacgcgcgcccattgcaccggatcggcatccagcagcgaatcgcgagtctcagcgaactcatcttcgaccgcacggccaagcaacgtggcatcaagagccacatccttgcctgatgcaatcgatgctttaaccgcgtgggtcttcgcacggtcaacgatattcttgaggctcgcgccggaaaccacgtcggccaggaacagcgcattccacgtgccgcgctcgtcacgcacgtcggcgagatgccggcgctcggaacgtgtatagatatctcgcacaagtacgcgggagagcgcatcggcatccagaccctgttcaagcggcaggtcgtcagtcaggtaatgacgcacgatggaggcggcggcctcgccggaaggccggtctatacgaatcttcacgtcaagacggcccgggcgcagcacggcgggatcgatcatgtccacgcgattggatgcgccaatcaccatcacattatcgagcgattccacgccgtcgagttcggaaaggaactgtggcacgatggtggtttccacgtcggaggatacaccggagccgcgggttcttagcagcgagtccatctcatcgatgaatacgaccaccagcttgccttcggcggcgcgttcgcgggcgcgttgaaaaatcagacgaatcagacgctcggattcaccgacgtacttgttgagcagttcaggccctttgacggacagaaatacgcctttgacctgctgctctctgccgttgatagagccatcgccatccatgtcacagccgccttcgcacaaggcattggccacggctttggcaatcatcgttttgccattgccgggaggcccgtagagcaatacgcccttcggcggcttcaaatcatagcgctcaaatagcgcgcgatgctggaacggcagctgcacggcatccctgatgcggccgatctcgctgtccaaaccgccgatgtcggcaaaggtgacgtctggagtctcttccaacactagatcacggtcaccctcattgggcagcagttcgatggcgagacgcacggacggatcgacgataatgcgatcgccttgactgatggcggtcaaactgagtgcgctggaacgacgcaccaacacgggattgccggaagcatcgacaacgatcagacgcccatcatcgagtatttgcttgactacgcgaatctggcccacagtgtcggcatcgcgctgttcgaccagcacgagcttctcgttgagcacaacagtggaaccagcggcgagacgagacgcgttgacgttcgcggccacgggcacaatcatgcgtcgagtaccggaaatcacctcggcactggcatgctgtacgccgtcctcatcggtgtgggtcgaatcgattttgaccatcgtggcgaaggtgagcggcggctgtgcgagttgcgccagctgcgatttggctttggtgagctctttgccggcacggttcagagcttcggcgagcgcatggttcttggccataagccggtcgttcagctcggcaagattttcggcttctcccatatatgccttcactcccctatcggaaccatccgaacccttatgcgggcttggcgttattcgccatgctgtgctttcctgttacgcaccacagtacgcacttttttcaccgcgaaccatacgatgaccacaaccacggccacgatgaccacgtcttcgaacacaccgagcgcaccttgaatcgagcaccattggtctccgagcagataacctgcggacaccaagatggtgttccatacggccgatccgagcagggtccagccggtgaactgcaggaaattcatgcggttgaagccggcgggaatggaaatcagcgaacgcaccacgggaatcactcggccgataagcaccgaccatgtgccgtacttggtgaaccaatcgttggccttgctcacatccttgcggctgacgcctggaatcttgtccgccgcgcggttgatacgatgcaagcccacccagcgggaaatgccatacagcgtccatgcacccagcaaagagccaatggtggcccagatgatcgcgccaggcagactcagcgtgccgcgagccgcggtgaagcctgcgagtggcagaatcacttcggaagggatgggcgggaacaccgattcgagcgcgatggccagagccacgccgatgccgccgatggtttccatcagggtgatgagccattcggtgatggtgccgatcaggccgccttcagacgtggtgcagatgggtgtggggttagccgcgagtgcagtggcaagctccatagaaaaactcatagagggcattgtcccaaggtttctcgagaatcgaaagcatgatgcaagaagatgtgcattttattgacaagtccgccgaaagcgaagttggggctttgggcggttccgccgattccgtaccaacgctggctgagcccggtctgctggtgatggatgtggactccacgctcattgatgaagaggttatcgatgagttgggcgaggccgccggatccggcgaggaaatcgcgaaggtgaccgaacgcgcgatgcgcggcgaactggagttctgcgatgcgctgcgggctcgcgtggcgctgcttgagggtttgccggtctccgtgttcgacgccgtgcatgacaagctgcatttcaccaaaggcgcgctggagctgattgacacgctgcatgcgcatggctggaaggtcggcgtagtatccggcggcttccatgaggtggtcgacaagctggccgccgaggggcatatcgattattggattgcgaaccgacttgaagttgccgatgggcgcttgaccggcaaggtgttgggcgagattgtctgcaagaccgtgaaactgcatgcgctgcgggagtgggccaagcagctggatattccgatgagccagaccgtggccgtgggtgatggcgcgaatgatattccgatgattcaggccgccagtctgggtattgctttctgcgccaagccgaagacccagctcgccgccgacgaggctatcaacgaccgcgacctgatgcacgtactcgactatctgcgccggtagaccggtagataattaccggtattggctgaggcccttatagttgaggcatgactacatcggacgcacagcagctcacgcttgacgggttggccccgcgcaagcggcgcaaacgtgcgcccgcggagcacacgcccgccgagcatgatcccattgcacaagtggtgctcgatgtgcaggcgctgcatcttggtcagacattcgactacttcatcgacgagaaggacagtgatgccgcgcaacccggcgttctggtgcgtgtgcagttcggtggtcaacgggtcggcggcgtgatttggtcgcgtacatccactagcgatacaccgcgctcttcaattcgctatatcgagcgagtgctgagtcctgacgtgctagtccccgcttcgatgcgcgaggatatcgggcttatagccaatgcctatggcggcactcgggccaatattctgcgttttgccgtgccgccgcgcgtggccaaagtggagaccgaacagcggctgaccgcatcgttccagcgcccagttggcggatcgctgccagataacatacaaggagggtttgccggtcacggcacacttccggacggcccccacccatccggctcctcgtttgaggtggccagatcggtctcggagggcgccgcacaaggatatcgtcgcatcgccgccaattatggcgaggccaatgcgttgaacgatgccctgcacgggcaacggttccaatcctttgttttcgattcgctgcccggagcccaggaatggcaacggaatatggcatggatggcggccacctcgctcagtgccggcaaatcagccgtggtagagcttcccaccatgcgggaagtcgaggatctgctaccggctctgcgcaactacgggctcaaaccgttctcccccacgccttccggcggctggataggcgatgtcgcagtgctgaatgctcaaatgcctgcggcggaccgataccgtgcgtatttggccgtggcattaggacaggtaaaggtgattatcggcacccgcgcggtgatgtatgcgccggttgaaggtcctgctctgttcgccatattggaagatgccgcctatcaaaacatggacggcatgatgccgtatccgcaggcacgcggcgtgatgcggctacgcgccaaatcacacggcggcgtattcgtggcgatgtccaatgcacgcacagtgcagagtcagtgggagaacactggcccaggcacggtggagacgccggtaagtggctattccacggcaatccatccgcttgcctcaccgctgaaagatgcgacgccgtgggttcgctggctgaatcgcgacgagctggctcgtttggcggatgcgaccatcggcgctcgtgtgcctcatacggctgtgcgtgcgctcagcaaagcgttggaaagcggccccgtgctgctctcgattcctcaggacagtaccagtgaagcattgagctgcgcgaaatgccaccgtcaggcacgctgcgcgaaatgttccggtccgctgcaattgccggcagatagaagcgaatccgcgcctcggtgccaatggtgcggcgctgcggccattcattggacatgccccggctgtgggcatgaacgcatgcgtgtggtacgtgtgggggcggccggcacggctgctgaattggctggactgttccgcagcgtgccgatggtgttgtccagcaaggctcagggattggtccgcgatgtgccgtgcaagccgatgattgtgattgccacgccgggtttcgagccgcgtgtgcgcccggtgagcaatgagcggggggcggctggccacgaataccgcgccgtggcgattcttgatgcttggaccagtctgtatgcactgggtgtagatgcacgcttggatacgttgacggcttggatgcgggcggtttcgctgtgcgcgcctcgctctcgaggcgggcaggcgctgatattgggagagaccgatccggccatcgctcaatcgttgatgatgtgggattcgcgaattttggcatccaaggatctggacgagcgcatggaaaccggtatgccgccgactgtggccgcggcctgtgtgtggggccgacgcgatgcggtgatgacgctgatgcagcgcattggcgcgctcggaggagactgggcggtatgcggcgagttgccgggcatgctgggaccggtgccgattgctcagcccgataccgtcgatgcgcgggagctcgaagccacggccgaccgggtgaaagccgtggtacgtgtgccgcaaagccagcgagctgagctggccattcgtcttcaccgggaaacagcccgtcacgtggcttccagggagccgggcgaactccgtttccgcattgaccccaaggatttaatctaggttcttccccacgtcgatgtctctctggctcccctgcggagaggagctgtatgcgacgacagactgagggaggtccaagaaagacccaatcgtctccaacacgtgaaacgatgattacagaacaacaacctcaaaacggaggaggaaccatgaagggttggcccggagagccggatatggattacgacgtgctggtcgctgacggcgaggctgccgccaacgccggcaaaccaatcaccgacgtgattttcgacttcggtaatgtactgatctactgggatccggccgcagtgcttatcccccgttacagccaaaagaccatcgacgaattcctcgataacgacatctcgggcttctacgatgtcaacgacctcatggatggcggcaccagcaccgaagaggccatcgccattatgcgcgaacgtaagggcgacaagtgggctgacatcctcgactattacatcaagaacttccgcgattccctgaccggcattgtgcccggcgcgcgcgtgctggtcgacgacctcaaggccgccggcatcggcgtgtggggattgagcaattgggaggccagcctgttccatgtggccgaggaacagtgcgatattctgcaggaactggacggcaagctggtctccggattcgtcaagctgcgcaagcctcacaaggaaatctacgatgcggcgctgaaggagttcggcatcaaggcggatggcgctctgttcattgacgacaaggccatgaacatcgttggctcgaacgctgcaggcattcgtggcgttcgcttccaggatcccgtcaagctgcgcgaattgctcattgccaacggcgtgaacattcccgacgtgcagtaggactctgttccgcaccccgcttttgacactcgtcagatgcagagcctgcgcatgtgcggccaccgcattctcgcttatccattgacaatgactttatccgtgacatgagcacgggtttgttcccgctaaggaagaaatatgctcaaactagtgtttgccggcacgcccgatgtagcagtgccctcacttcaggcgttcgccgccgactctcgttttgaggtcgtcggcgtcatcacccgtccggacgcgcctactggccgtggtcgaaagctcacgccgagcccggtcaaagccgcagccatggagcttggtctgaccgtgattgacgccaagcctcgctcccccgagttcatggaggccctgaacgggctacatgcggatatcgccgccgtcatcgcttatggcaatatcctgcctaagtccgtgctggatgccgtgccaatgggctggtacaacctgcacttctccaacctgccgaagtggcgcggcgctgcccccgcccagcgtgcaatctggaatggcgatccgaccactggtgccgatgtattcaaggtcggagaaggtctggatgatgggccaatcatcgcctcgttgacggtcgagctgactggtcgggagacttctggcgagttgctcacacgattggcggaagagggcgcgcccatgtatgtggacgctttggccgccgtgggtgatggcactgccatattcacgccgcagcccgccgagggtttggaatacgcgcataaaatcaccgtggaagatgctcgcatcaactgggctgacccggcggaggccatcgaccgccagattcgtgcatgcacgccgcatccgggagcttggaccgaactgtttgcagaggggttgatagctgacagcggcgaggccaacgaggaatcgtcgaatcttgcgaccaccgccaagtctctcacattgcacattcttgccgcgcaaccagctgatcagacgaatcccaatactccaatcgacctcgatcccggcgaactgaaggtcggcaagaagaatgtatgggtcggtaccggtaccggcgcgctggaactcacccaggtcaaggcccagggcaagaaagccatgcgcgctgccgactgggcccgaggcgcacgcctctcccccgctgcctgcgtgaggtaaagcggcttcgctcccgctggcgggagagccgtatagcagaacagcccagtgggctgtttgtaggcgagtgtgagccgtcaggcgaatcagaaaaacatggccataggccatccgcgattgcagggctcggagagctgtcgaacacagtgagactgagggcggtcgttagggcatctcgctaggaaccatcctcagtcttgcttcgcaagccagctcccaacagtcaggagcaaagcaaaaggtccgacaccttcttcgtgaaggtaccggaccttttcaactatgcaatctgctatcaggcaagaccggagagcttgttgataagctccgggtcacgggtcgcgcccttgtcggccgagcgggcgaaagcagcgtatgccttcaacgcctgggagacatgacggtcgcgatgagccacgtagccgtcgccggcctcaagttcacgacgacgctcgtccagctgctcgtcggtcagctcaacgttcacggaacgggcttcgatgtcgatgtcgatgatgtcgccgttcttgatgagcgccaccggccccttgttcgcggcctcaggagccatgtggccaatggccagaccggaggaaccaccggagtagcggccgtcggtgagcattgcgacctgcttgccgatgcccttgcccttgacgaaggaggtcgggtacagcatttcctgcatacccgggccacccttcggaccctcgtaacgaatgaccagagccatgccgggcttcagggtgtcgttcaggatgacctcgatggcctgctcctgggagtcgaccaccagagccggtccacggaacttccagatctccggtggaacaccggcggtcttgaccacgcagccgtcaggggccagattgccgcgcagcacagcgagaccgccttcgtggatctccgggtggttgatgtcgtggatggcgccgttgacacggtcggtgtcgagcgaatcaaacagagtggtgtgcgtccacggctccggggagatgatgtggccaggagcggccttgtacatctgcttggcttcctctgtgcaggtggggcgcatgatgtcccaatcggccagcttggcttccagcgtcgggtagtcgatggagtgcacgttggtgtgcagcttgcccgcgcgctcgagttcgccgaggatgccggtgataccgccggcacggtgcacatcggagatctcccacttgccggaggggctggccttgcagatgcacggcacggtgtgcgagatgcgctcgatgtcgtccaaggtgaagtccacatcggcggactgggccatagcgagaatgtgcagcacggtgttggtggaaccacccatggccacatccatggtcatggcgttctcgaaggcttccttggtggcgatggagcgcggcagcacggaatcgtcggaatcgtcgtagtactggtgggcgatcttgacgacctgctgggcggcgcgcttgaacaggtccttgcggtaggagtgggaggcgaggatggtgccgttgccgggcagggccaggccgatggcctcggtcaggcagttcatcgagttggcggtgaacatgccggcgcaggagccgcaggtcgggcagacggtcttctcgtagttgagcagttcctcgtcggacacggagtcgtcggcggtggcgtacatcacgtcgatgaggtcggtgctcttgacggtgccgtcggcgagcaccgtggtgccggcctccatcgggccgccagagacgaacacggtcgggatgttgaggcgcagggcggccatcagcatgcccggcacgaccttgtcgcagttcgggatgcagatcagggcgtcggcacagtgcgcgttgcactggtattcgacggtgtcagcgatgatgtcgcgggaaggcagggagtaaagcatgccggtgtggcccatggcgatgccgtcgtccacagccatcgtgttgaactcgcgcggaataccgccggcttcccggatggcctcggaaacgatgcgtccgaccttgttcagatgaacgtggccaggcaggaactcatcgaaggagttggcgatggcgatgatgggcttcttgcccatgtcgtctccgctgacgcctgcagcacggtaaagggctcgagcgcctgcaaagacgcgccctgacataatttttgcagatcgcatttcagtcatggttctattcaagcctttgcgagggacacgccacttgtcaagagtcgaatagtggaattttcaaaaacgtaacgtttctcacacataaattttcttggaagaagtcgccccaaacctctatactcgcctcgttgagatagattttccaagtctggagatatgaataatggcttttggcactgacccgacccctgatggtctcgcaaacccgccgatcgacgacctgatgcagcacgccgattccaagtacgctctggccattttcgccgccaagcgcgcccgtcagatcaactcctacttcacccagcttaacgagggcctgctgcagaacgtcggcccgctggtcgaataccagaacaacgagaagccgctgtccatcgcattccgcgagatcgacgagggcctgcttgaggagaccctgggcgaggacgacaccaacgagggcaactgatttcccactggcttgggcttgagttagacacttacccgatgcttgccgcatagctgccgtcgatatgctttcgactgatttagggcgacacacttgctcatgttgcggcaatcggctataactcaagttcaggagcgaacgtgttgttaagggctcgcgccaccgtgtggttggcacgagcccttaactatgtgtgcttcatcaataactcaatacatagcaatcaacgacgtatcattgtgcctcgctttccgcggggcgataagtcctgaagaaagggatgatatgacagaagaacatcggcttatttccgccgaatccgtgaccgaaggtcaccccgataaggtctgcgatcaaatctccgacgccattcttgatgatctgctggcccaggatccgtccagccatgtggccgtggagacctccgccgccaccggcgtgttcctggtcttcggcgaagtcacgtctgaaggatattgcgacgtgcagtccaaggtgcgcgagacgctgcgcaatatcggctacacctcctccgaggtcggtctcgatgccgattcctgcggcgtcgtggtggccatcaccgagcaaagcgccgaaatcaaccaaggtgttgctcgactgaccggcgcgcaagagaccgccgccagccgtgaagagcgttacgaggcacagggtgccggcgatcagggcgtgatgttcggctatgccaccgacgagaccccgacgttgatgccgctgccgatttatctggcacatcgtcttgccttccgcctgaccgaggtccgcaagtccggcaaagtgccgcacctgcgcccggacggcaaaacccaggtgaccattgaatacgacgacaacgatcagccagttcgtctggacaccgtgctgatctccacccagcatgatcctgaggttacgcaggattggcttgcggttgagctgaagaaacacgtgattgacccggtgcttgatgaagtgctgggctccaaggtgccgcacgacaactaccgccagctggtcaacccgaccggttcgttcatcttgggtggcccggccgccgacgccggcctgaccggacgcaagatcatcgtggacacctacggtggcgctgctcaccacggtggcggcgcgttctccggcaaggacccgtccaaggtcgaccgttccgccgcgtacgcgactcgctgggttgccaagaacatcgtggccgccggtctggcccacaaggttgagatccagatcgcctacgccattggtgttgccgacccggtgtccattaacgtggagactttcggcaccgagcagggtgtgacgcgaggccagattgccgccgccgtgcgcaaggtcttcgatctgcgccccgctgcgattatcgacgagctggatctgaaacgtccgatttatctgaagaccgccgcgtatggtcacttcggccgcacggacgttgagttcccgtgggagaagactgacaaggtcgaggagctcaaggccgcgattgctggggagtgagctgaattaagttccaattgaattcaacgggtgcctcccacttgttacggtggaaggcacccgtttttcaagcactgctaacatgcctctccattcagaggcatgttagtagtaaacccagtagtatattccagtgcgcagtagcatgaaaacatatctcgcctaaatgccaaaggagcctagcatggaacgcgtcagacttgtcgactggctaaagagcgagcgagaccagcatgttggcggaggcctgtactacaactcacagattctatttgcctacaattccaaccacatggaaggctccactctttcaccagaacaaaccgcgcagctgttcaacacaggtgccttgctccccgacaacatcaacgatgaaatcagagcagacgatgtcgccgaaacaacgaaccacttcaatgcgttcaattgggtcttagatcatgtagacgacccagtaaacaaaagccttgtatgcagccttcatggaattctcaaacgcggcaccagccaagaattcgacgccaaccgcaacgtcggcggatacaaaatagtgcccaacgtcatcagccaacttgagggaattcatacggtactccccgcagatgtgcctcttgccatgaaacaggtattcagcttgtactcacaattggaagatgatccttttgcaatcgcaaaagcacattggatgttcgaatccacgcacccattctccgacggtaacggtcgagttgggcgactcgtcatgtttaaagaactcttgcgcttagattccgttccagctctggtattggacgaacaccacaatctttatactcgcgcactaaagaatttcccaaacgaacccggatatctggtggacctgcttcttaatgaacgcgattactatcaacgaatgatcgaaacatacgcaccgaaccgtatccgatactcatacgttgaccagtggaaccaagctggtatcctaagacacctcaatcatcatccaacatctcacgctcgaaatcgtcaaaatcagcctcagtatgcagaacggtatcagtgggcaaagcatgcaacgttttgcccacagcctcagccgaagcgtaagtcgacaaactgtcggcaatcgtcatagccacatcacctttcatcactagtagctttcaacgtatccctacatcctaggacacgtcataagcgcctagaccacaagggaatccggcacgtctcagaccaaccgcacgccctttcttgtgtacagatctagtggtgcttgccctccatcccgtcttgagtatcagtatcataggcatcgtcgatgtcgaatccgcctataagcacaaagcgcctcaacatatttgtggcacgcatgcgtactttgaacaccggcaatggtgtgtgatcgcattgctcgaagaaagctttcgctcgatgtacgtcaatcgaggagcgcagcacatcgaaacgcccgaactcgttgatgttcgcttcatctatacgtttggcaaggaactcctcgaccaccgacctattaacgcccagccgatcaactagtttgtcgacttgatcgttcttctctcgcgcagcataacgagtgatgtaatcacgtagcgtcatgccggcttcaacctccacgtcgccacgctccacgtcatgcaggaacagttcggcgagtcgttgttcgtcccgcgagagcgcggcaaaggaacggtgtagctgcgcagacatctccgccaattccgggctattctccttgagcgccttcagccatttattgaagttggcattcatgtaatcggtatcgatgagtccggtattgatttcggtaagatagccattcaattcatatggcgcttcgggattattttttacgccatcatctgaatcaccaccgcagccgctattgccatagaacagttctttatagcgttgcgcaagaatgaggtatgtacgttcgtcgatttgaggacgcactacttcagactcgtcatgctcatcattgtcctcattcgtatcgtcagtatccgtactatcgaccttgtattctgtggtactccagtcaaagccctgcactttcgccgcttcaaggtaccggttcagttccacgaactccttggcaaacttgcgtctggcctccaccgattccggcaactgcataaggtccgattccccgttatccgagaacacgtcaagaatttcccggtaccgcgtatccatggattttacgttcgccggcaatttctgcacgaacaggtcaagcggccgatcgcccgaatacagtttcaccgctgcttcaatgaagccatgcatggtgtgcggtttgcggtagtagcgaatgacaccgaacggcttgtccggtccgaacagacgattcgtgcgactgaatgcctggatgatgctttcgtagtcgatgatcttgtcgagatacaacgtattcacccattttgagtcaaatccggtaagcatctggtccacgacaatgagcaaatcgagctgctgactgcggtttgttgctatgccgccgtacggactcttatgcgatagtcgcgacgaaatatctttcttcatcgccggccatgtggggatgatgaactctttgccgaacgcctcattgtaatcggtgatgatttcagtcagcgcatcttctttgtccgttgctccttcgttgttgtcgatgttgggatcgaacaacgccgttacatgcaacttaggtgcttgctgcttgaacaagtgataatagttgacagcttcaggaatggagctagtggcgagcatcgcatggaatttgcccgcatggctgagcaccgggaactgttcgagaatgtccgagaccaccatgttcggatgcggggaatcgatgccatattggtctcgtccaaggaaatcctcgatgccgctaatacagtttccagcgccatcaaccatcggacccatggggacctcagacttatccatgtaatgctggaatactttggccttgaccgggtcggcgagcgcatcttccgtactctccaccttcgccttgtcgagagccacggcacgtctgacttcagaatccttgtacgtggtcaccatgtacgggtcgaatctgagtacattatggtcacgaatgccgtcggcgatgctgtaccggtgcaagcaacggccgaataccatggcagtggtggaattcttcttctggttttcgtccaggatgggcgtgccggtaaatccgaagaacagcgcgttcgggaaggagcgccggatgtcctgcaacatgtcgccgaatgtggaacgatggcattcgtccacaataaagacgatacgtcgtgcagccagctgatccagccatgtctgggtgacgcctcgctcccctgctttcacgttgctcatcttctggattgaggtgacgatcagggtgtcgttgacattggtgctgttgagtttgtcccgcaaaacaccggtgttctcggtaccttgcacttccgtctcgctgtcggcaaagctgcggtactccttcaacgattgagtacccaattcaatgcggtccatgagaaacacgactttatcggcgtcatgcgaatcggcgatgagctgtgccgatttgaagctggtcatggtttttccggaaccggtagtgtgccatacatagccgccgggtcgtcctggggtagctggccgctgttcccaatcacatttcctcaccacatcagagatggcgtttgccgcgatgtactgataactacgcagcaccttaaggcatccatccgctgaatcagcgatagtgtagaagccgatgagctgatgcgccatgggaatggacagcaggcctgcggtaccggaggtgcctccgatgaacagcttccattcgtctttgccagggttttgcccgccacagataggctcattgttgtagtcagcccaatggaagtaatagcttggattgaatttgtctacacccggattagcgaagtagacggcgtcatcggggttcatggccacaaaaatctgtactagacggaacaggccggtgaacacaccttcgtgcgcatatttctcgatctgattggttgcttggctgaccggtatgccacttttcttgagctcgatatggatcaatggcatgccattgatgagaagcacgaggtcgccgcgccgcgagttcaacatcttgttcttggctggatagaccggttgctgagcgatctgataagtgcttttgccgcccgcgatttccttgcggtcatagatgtagagactgacttccttgccgaaatgcgccacatcttctttgttgtcacgcgtgatagacacggtacgcccgttgacgaacgaattgagcgcgagcggcgttcgcagggtctcgatctgctcgattatctgggtcatttccccgtctgtcagcgggtatttgccgagcctgtctatgtcattgttgttgcggtacagtatgcctttccaattgtcgagcaaatcccgctcagttggatagcgcaggacaccgtccttccatccatgctgcttaagcacggtgatgacgttttcctcaaacaccgattcgctatcgaatatcatgattcttctctccccgaacttcccagtgtcctgcctttcgcgagccgacgcgcttaagcaatccacacccaatgagtatttcagcatcccttcgcacagtcgctgatgagactcccgcagcacgcgccatatcatcgtatgtcgcgctggggctcttctctacaaaatgaagaatgactcgctgtctctcggttatccgctcattcgaaccatttaactgctcattattgtcagatatctgctcattcgaactatttatctgctcataatcgtcagttatctgctcattgttatcaggcttggcatccgcctccaacatgagcgtgagtatcgtgcgatcagcttctccgaagttctcttcaatccgtggttcaggaagtcctgcattcgcccatgtggcgaacacatcggggacacccgtaccagctcgctcgcccacatcgattaggctgaacatcttcatgacaagaccgttgcgcggatcagacaccccgccgaggcgcatctgttcaatgccggttcggatatcacccggattctcgaacaccagcttgtcgggggtgcgcctgaccaccactccgcgtacgccatggtaatcggcgttgaacaagcagttggccaacgcctcacggaccgccttatgcatgggggcgtcgtcgacgcggaaaatgccgtcgagcttgaatggggtcttcagggattcggcaagcttgcggttcacgcggaagaagaaatcgaacaggttgcccgaccacatgccatctcccgaatgcacacgatcggtccagcgaatcgccggatccagagtctcctgatagtcaagaaaaactgcgggcattcgcgcacgatgtcatagtcgttgccgaacatgagcaggccgccgaacgtgggatgcagcctgccatcctcacggcttaccgccgccgcgccaatggcgcgtagaaaacgctcgtcatcaaggtccgtccatgaactgccctgacgtaccgtgcggaaacgattgcgatacgccctcaccgtgtccatgttgaaatcggcgacggtgagatcgtccaacactttggagtccatcgtctcgaatccctggtcccgaagcatcgccgaaatctcctgcctcgtgcaacgataatcgccctcaccgcgccggcgataggttcccgcaaagagatcgccgtgatatacacagggcgttcctcgcgcggggcacgcggaacatgaatggccaccaccatgccaccatccgcttcgagcacctcgacttccgattcgatgggcagcacggcgcttaccttggaccggttgctgaccgtgttccaaaagtcctggcgaagatgttccgcttcagttggtgtaagtccaatcggcgcgaaggtaccgtcttcgcgctccttgacaccaagcagaatgacgccgccgtaggtgttggcaaaagcggagtaggtctcccatatgctgtgcgggaggccgcccttcgcggacttcgcctcgatccggttattctcgcgatatgaggcgagcttcgcgatatcgaatagttccatggcggattcctcccctcacacgaacatcttgtcaagcaaggatttcttgatgttctgcagcaattccaacttacgctgatgaagggtgatgaggcggtcgaggtcggcgaaaaagttcccgaggtgattttgctcaactacatttggaacgcttagaattttttcaaaatagggatgcgtcgaaaagacgcataaacgcacgaaaaatgcgggcatccgatatgcagtgttcattgaatcactgtatatcggatgcccacaattgtttcagaccaattgaagagccttagctcagcatcagcctcacgccttggcgacctcaacggccagctcggcgccttccttcacttcgaaggaggtagccagcgtctcgtgggcgatcagatccttgaactgctcgaccttggccacatcggcggccggaacggtcagcaccagggagatgcgatcggcgatgtccagatcggcggccttgcgggcgtcctgcacggcgcggatggcgtcgcgtgcgtagccctcggccagcaggtcgtcatccagagcggtgtcgagaatcacgaagccaccggtcggcagagcggcggacaccgaagcggcggcctcggcggcgttctcctcctccacacggttgatgagctcgtactcgccttcgaccagttccaaatcgccggacggcgtggaaaccaccggagcgccggaagcgttgacgctccagtcgccagacttggatgccttgatggcgaactgcacctgcttgcccagacgcgggccggcagcgcgagcgttcacgcgcagctcgtgcacgatcttcagaccctgggaaccagcgtcctccatcgtgcagaattcgatatccttgacgttgagctcggacttcagcaactcgtcgtaggccttgactgcgtccacatcctcggccaccacagtgagcttggcaagcggctgacgcacgcggatcttggcggacttacgcagggacagggtgccggaaacgacttcgcgcaccttctccattgcggcgaccagaaccggatcgtcgaccagaacacgaccaagttcggtgtccgcaccggtcttctcgtccaccacatacggccagtcggccagatgcacggactcgccaccggtcagaccgcgccacacggactcggcctccatcggagcaagcggagcaagcacgcgcatgaacgcctcaagcacggtgtacagcgtgttgaacgcggtggcatcctcattccagaagcggtcgcgggtgttgcggatgtaccagttggtgagcacgtcgatgaagtcggagaccgcatcgcaggcgtcggaaatcgcgaactcgttcagcgacttctccacacgctccaccagacggcgggtgcgggccagcagatagcgatccatctgcggcaggccagcgacctcgtcggcacgcagctggcgggcgtcgaatccggccccgccgttggccgcgttggcgtacagcgtgaagaagtagtaggagctccacaccggcagcatgacctggcgcacggtgtcgcggatgccctcggcggtgacgatcaggttgccaccgcgcagaatcggcgaggacatgaggaaccagcgcatggcgtcggaaccgtacttgtcgaacacgccgttcacgtccgggtagttgcgcaggtgcttggacatcttctggccgtcggagccgagcacgatgccgtggcagatcacgttcttgaatgccggtcggtcgaacagggcggtcgccatgacgtgcagcaggtagaaccagccacgagtctggccgatgtattccacgatgtaatcggccgggaagtgctgttcgaacttctccttgttctcgaacgggtagtggaactgcgcgaacgacatggagccggactcgaaccagcaatcgagcacatcagagatacggtgcatgtgcgatttgccggtcggatcatccgggttcacgcgcgtcaggttgtcgatccacggacggtgcatgttgacgttgccgtctttgtcgcgcgggtagtcgccgaagtcggccttgagttcctcaagcgaaccgtacacgtccacacgagggtacttcgggtcatcggacacccacaccggaatcggggaaccccagaaacggttgcgggagattgaccaatcacgcgcgttggcaagccacttgccgaattggccgcccttcacgttctccggaatccagttgatctgctggttgagctccagcaggcgcggcttgatcttggtcacggacacgaaccaggaggaaaccggcttgtaaatcagcggggtggcgcagcgccagcagtgcgggtaggagtgcacgtagctcttctcctggaagaggatcgcgcgctggtcttcgggaatctcggcgagcgggccgtcgccggcacgcaggttgcgcaggatcggcaggttcgcgtcgaacacgtacatgccctcgtattccgggcactgggaggtgaagcggcagccggcgtcgagcacatccgtgctcttgactccgtgcgcgttcagcgtgttcatatcgtcctcaccgtagggagcctggtgaaccaggccggtaccttcgacggtgtcgacgtagtcggcggtgaagatcgtgtagccgttcggaccgggcacattgccttcggtctcggctttctcccccgcgaagtacgggaagaccgggtagtagcgacgaccagccagctcagagcccttgagctcacgcacgacctcgtaattctcgccgagttccttggtgtagtgctcaagcagcggcttgccgaagtagaacttcttgccggcgaacttgccttcggtcggacgcacctcaacataatcgatgtcggcgccgaccacgatggcgaagttggtgggcacggtccacggcgtagtggtccagaagacggcgtaggcatcttcctcatcacgcatcttgacagccacggacacggtggtgtcctgacgatcctgatacacatcggcatccatgcgcagctcgtgcgcggaaagcggcgtctgatccttcgggcagtacggcagcacgcggtagccctggtaggccaggcccttgtcgtagagctgcttgaaggcccacatcaccgattccatgtacgggatgttcagggtcttgtagccgtgctcgaagtcgacccagcgggcctgacgatgcacgtagtcctgccattcatgcgtgtacttcagcacggaggcgcggcaggcgtcgttgaacttgtcgatgcccatcttctcgatctggtcgaccgagtcgatgccgagctccttctgcgcctcgagctcagcaggcaggccgtgggtgtcccaaccgaacacgcggttgaccttgcggcccttcatggtctggtagcgcggaatcacatccttggcatagccggtcagcaggtggccgtagtgcggcaggccgttcgcgaaaggcgggccgtcgaagaacacgaattcgttctggctgtggtcgccggagggattgcgctccaccgacttctggaaggtatcgtccttatcccaatagttaagaacggtctcctccatttgggggaagctggggttcggcgccacgtgtgcggtctcgccgccctcgttcgccttgggatatacgttttcgctcaccgtaaatctcctagttgtactgtgcactggtcctacaggagcatcattggtggcgattgattcaagtggccgctttagtagtcgtcccgcccgaacccatcgtcagatgatgttcctgcctacgaggacgatgacgagcgttttgtacgctccacaccgcggtaccacctcgcttatcgcaccggttgcgctccgccgaattgttgcactcagcgcagcgcggcctgcacgaccgcttgtgttcggctgtctcgggccgatcccgtcggttctactaggcgattgctgccgttcttccgaagactccccgctgataacggatcactgcctcacaacggtgcatatcctaacacgccacgcggtcaagtctgcacgaatgttcactgagagacgccgttgaccgcgaacccgtgaatgttgcagacatttctgtatcagttatcagtcatgcagacatatccgtacaagttatcgccgatttatagccataactagacggataatgactgcatcccgttaatccaacaggttatgtctgcaaaatccaccagtacaacaacggattacgtctgcattctcttatggtcagtccaattcgttcccgcatagcgtctaaatggacgtgttaggtctgcatccaattcacggcctgcaagactctgcactcagcaattacttcgcaccaaaccgctcacgaatctgagcggcagtaccataagaggcttgcgcgccgaacccagtcgcggcgtacgcggaaacgtatgaggccaactgcgcactgtccgacaacgcatgacccgaggcaagtccggccagaaccgtgcccataaaggcatctccgcacccggtagtgtcgatggcctcaaccacaactggcgcaatacgatagatatcatcaccatcgatgactaccgacccatccccgccaagcgtaattaccgcctgattaaagccgaagtcatgcatctgccgcgccacatcagaccagtccagtccatcccaatcgtcatcgtcaggctcggcgatgtccagcagctgcgccatttcatgctcattgaccaacagaatgtccgaagcctcgataagctcagcgggtagttcagcaacgaatggcgaatcgttgagcaataccttgagcccggcatcatgacagaggcgagcacatgcggtgaccgtttccatcggactttccaaacacagtcccagcacatcggcggcaaccaatgcatcagatgactgctgcacatagtcgacagatacctcaccattggagccagccgaatatacgatggtgttctcgccattcgcatcgacggtaatcaccgtggtgccgctgggacctgcaacggcagcgatatgcgaagtatccacaccagcatcgcgcaaatgctccagcagaaaagccgcattggcatcttcccctactgcaccaaacatctgcacctgcgctccaattcgcgcagccgccgatgcctgattcgctgacttgcctcccggcaataaggtcagcgggccaccgttgacggtctctcccggtttcggcaaccgtttcgcagttacggtatagtccacattcattgaaccgataaccgaaattcgcgaccgagatgcaacaatatcgtctagtaatcccagcacatcatcggaaacaaacttgttgtcaattaacgtcatcactattgtcctttcgtccgcaattcgagccaaccacaatcagaacggcacaccacagcggaagatcacgttggagtatgaagtagtttcgccggtgcgaatcacgaatttcacacctttcaccttcgctttgaaaccgttctcaccatcgtggggtacgtagctcaacggcacatcaaatcgatcttttacccattgctcggcaattgttccacgagcctcctcagccattatcccctcttcaagtaccaattcgggggcaatggcatccagcacctgctcgaatcgcggcacaccaaatgccacagccaaatcgatgacttcaatacctggctgtacaggcagaccggcatcagagaccacgaatctatccttatgccgtagaccggccaaagcctgtgcaagttgagcattgatgacaccatgagtaagcatgaattctccttttatatattcactacgttgtgcgatatgtcggtatagatatggcccaccatcatggttatcgatgatgatgggccatgttgtaaggggcttttaattcccggataagttatctcatattgtcactggaaatcagcgacgttccccttggtcacggtctttacttcaatggactcggtcttttcgacgctctcgcccttgatggccttaaccgcagcctcgacagctttcttaccaagctccttaggctgctgtgcgatagtgcctaccatggtaccattcgacaccgctttaagaccgtcttcagtaccgtcaaaaccgaagatcttcacatccgcaccggccttggaaccaagtgactggatagcgcctaatgccatttcgtcgttttcggcatagatgccaacgacatcaggattggactgcatcaggttagtagtcacatccagcgcctcggcacgatcgaagttcgcggtctgttcggccacgacttcaataccggagtacttcttgatctcctttttgaagccgtcgccacgatcgcgagtggaggcggcacccggagtgccctggagaatgatgaccttgcctttttctccgactgctttggccagctcatcagcagcctgagcaccaccagccacgttatcggaggcgatgtgcgaggttacatcttcaccggtgacggaacggtccacggagatgaccggcaggctggaagacagcaacggggccacggcaggagaagcggcatcagaatccacaggattgataatcacggccttggctccttgcgattgggcattctgcgcttgattctgctgagtggaggagtcgttctgagcatcggacaccatcaaatcgacaccaagatctttggcagcggcctgagcgccatcacgcaaatcgacaaagaacgggttgttgagcgtggagaccagaagcgcgaccttatcgccgccgctggaggacgtcgagccgcaagcggctgtacctgccattagggttcctgcgcatacaatcgcgagtgccgcacggaaggtcttcttcatagtggaattcaacatcattgtttctttctcttgtagttattggataaatgggattgaagatttggcttgttagttgaaacgcctttcgacgtgattagtgggcatccaccttgcgacgcagagtatcgaagctcaccgcgaaggcgatgaccagaccgataaccacctgctgccagaaggaggacacattgagaatattgaggccgttgcggatcacagcgagcagaatcgcaccgataaaggtgccagaaatcttgcccttgccacccgatagggacgctccaccgataaccacggaggcgatggcgtccatttcatatccggaagcagcctgaggttgagcggaatgcagacgaccggcaataaccagacctgcaacagccgcgaaaatgccggacagcacgaacaccataatctgggtcttatgcacggagataccggagagccgagaggcttccatattgccgccaaccgcatacatggaacgaccaatactggtgaagttcagaatcacggaggcgatgacgcccatgatgatcatcatgacaattgggatcgggataccaagtaccgtgctaccgaagaaattgaccataccggaagtggaaaccggtcgcccatcggaaatgaccaaggtcaagccgcgagcaacggacatcattgccagtgtcgcgatgaaggaaggcaacttcaggaacgcattcgcaataccggaaagcgcaccgaatacagcaccggttacgagtccaacaacaatggtgagaatcggaggcagccccatcgaagcgccagtgtaggcaaccaacatactggatacggcagcaaccgagccgacagacaagtcaataccagcctcgacgatgacaaaggtctggccgaatgccagaatggcgacagtcgcagcctgaataccgacattcaacagattcggcccggtcaagaaagcaggagtcgcgattgacaatatgatgcatagaataatcagacctatcaatgcaccattgcgcgatgcgaaacgcttcactttgtcaagtgtgctgacgctgccggaatcgtaaccgagtttttgttctttagcggtcatgatagtgttctccttcatttctcaacgtttgcagtagtgttttcgctgaagtcctcgttcatatgggaaacggccagtgacatgactctctcttgtgtggcctcactggccggcatttcgccgctcagtttgccgttgctcatcacgagcacgcgatcggacatgccgagtacttccggcagatcggaagatgccatcagcaccgcgccaccattggcggtaatctcgttgatcagctcgtaaatttcgactcgcgcaccaacatcaacacctctggtcggctcatcaagcaacagcaccttcacgttcgccatagaccatttgccgaacacgatcttctgctggttgccaccagacagggagcctgcagtttggtcaatattcgccatacggatacgcagtttcctggcggtatcgttttcgcggtcgcgttgccctttaagatcggcaaatccgaatttggaagtcggcaccatagtggcgagacccagattgtcagcgaccgatgcttcaagaatcaagccttgcgtgcggcgatcttcaggaaccagtcccaccccagcggcaatggtcttgtcaatggaagctttaggaagttgaacaccatccacagtcacggaaccagaatcgtatgagtcggcaccgaaaacagcacgcagcacttcagtgcgaccagcaccgaccagtcccgcaagaccaacgacttcgccggcatgcacgtcaaaggaaacatgctcaatggctccggcacgagtcaaatccttgacttccagcagcgttttacctggctgctgagcgactcgcggatattggttttcgatggagcgcccaaccatcaatcgcaccaattccgattcaggagctttcgcgtcaatcgtgtcgatgtatttgccatcacggagcaccgtgaccacatcaccaacacgtgcgatctcatcaaggtggtgcgagatgaataccatacccacgcctcttgccttgagctctcccatgatgacaaacagctgctcgcactccttgcgcgtcaaagccgccgtaggctcatccagaatgagaatcgaagcgtcctgcatgagcgctttggcgatttccaccatctgctgacgagccacgccaagctcacccatcggcgtggaaacatcttcgttaaggccaatcagcttcagcgcctcacgtgccttgcttttcatggcgcttttattaataaagccaaccttagtgggcagagcacccaaaaacagattttccattatcgacagctcaggcaccatgttgagctcttgatggattaccgcaataccaagcttgcgcgcagcttccacattgggaatgcgcaccgtttggccatcggcctcgatatgccctttatccggctgatagataccgctcatcattttgatgacggtcgacttgcctgcaccgttttcaccaagcaaaacatgaactttgccgggttccacggtgaccgacacgttatcgaccaccgtggagttgccgaatatcttcgacacccctaccagagataactgcgtcatacgcctctcgctttcgtcattgggccgacgtcactgccggcacaaaaccgcgacacatgtatgcgtcttggtcaacgctgaatcgtctcatcactgaaatgatttaacgtttaatcacttgcgtgattcataatatatcgtttaatcacaggggtcaatcagcgtgtcgagagcgttaacaatcgcgtcctaacgccattaccagcacatcagaaacacaatatggcacaaaaaaagacaaaatattggcggcgacggactattgagccgaaaccaccactctggcaacagaccctcgtgataaatacacggtgggcacatgaatggtactaccaccttggtgcacgccggattgcatggcctccaacaacaggtcgacgccttgacgccccatctgctccgcctgctgggaaatgaccgaaatctttggcgtcatcaagcgaaaaggcgcaatatcgtcaaatgatatcaacgacatctgagtaccaagctcaataccgcgatcgtgcaataagccgatgatggtgatggcatcaggtgaatacgcgcagataatggcggtaacgccgcattcaagtaaataatcgacagtatggcatcgcgattcatacgtcgaaccacaatccacaacaatgcccgtgtctccatgcagcagctccggagcggcggtccggaatgctacttcacgttcattgacgctatatgattccaacgaggaatgcgctatatacccaatacgtcgatgtccgagagcgaccaattcctccatcgcctcgcgaatgccggtgtaaggatccgacaccacaaaaggaaccgattcaatcccctgtacgcgtcgatccacaaagaccaacggcaaatctcgcgcgatcaacgatttcacacccggggagtcagatccttgaggaaccacaatcgcaccatcaatacgctgccccagcaagttcttgatgaatgcatcctgtcgttttacggtttccgccgacgtgccaatgagtgtagaaaatccatgtgcatacaggccctcttccatcgacgagaccaactcggcaaaatatgcgttgcgcagatccggcaccagcagaccaactgttttggtagcggacgaacgcatagatcgcgcacgctgatcaggcacatagcccatttcctcaactgttttcagcactaattgacgagtctcattggagaaacggcctttatcgtgaagaatctgagagacggcagcagctgacacaccagcctgctgggcgacatccttcaatgtcacgaatgccatatccgtctcctccttgcggcttactgcagcgttagaaatgcacaattcaaatgtacccttcttataaccgacgcccgcaaggtcgtgtcatgcgtcaaactcttttactgcagacatttttgaggcttctgctgttttcgtgggctagctgactggttccggtagtcggatgtcgagtccgccgcatctgagcatgatcaggctgatgaggttggtgacgtggtggaagccgtaggccacgcggacggtgaccttgatcccgttgtcgaacgcctcgagcctcgcgctcggatagccaggcccgattgtcctgaggatgtcgggacgccggcgtctgatcttcccggccggttcgacgatttcggggatgtggctgcggggcgcccggaacacccaatgcttcagttcgctcccggcccgtccgatcgggcgtccgagcaaaccgcgcaggagttcctcgagctgccgggctccgcccacagcaccgatgcgacgaccacgccgcacccggggcagtcgacgcgcggcatcatggcgacctgccccaccctccagcagccgaaatcccggtgccgccaacggcacacgccgccgccccggccataaccacgtcgtttccgcccgcagcgcgagcagcgcggcaccaccttcccagcgcgcacatggacctcgagcacgggctcaggacgcagcgggccgtcgacgatcctcgcggactcgacgaccatgcctttgacgttgaggagacgtttgaatatgccgttcatcaggcgttttccgtggttcgtttctttggtcggaaaacagaatacgcggaaacgccccctacgcttacgaaaccaacggctcaacgacgaacccacacccacgaaaacagcaatagcgccacaaaacaagcgtccgcaagttcctcttgacgagtggcattgtccaatacggtcactcggcgcggcaaagagatgtgacgagagccggcggtacagccaagccattcactgacttcgataatgcggcggcgagtctcttccttaaccgacaacgtcgggtcgccattcaataatcgggataccgctgcctgcgaaaatccggatttctatgcgatttccttcaccgtgaccatgacagcatctcccccaatgcaaacgttacgtagtacttcagtaaatgactttactacttagcgtaacgcacgagacccgcaaccggaatacaccggtcacgggctttgcgatatcaatatcacatcagcagacgatatgacctgatgtcagctctcgtcttcggcgacgcgggagcggctgtagatcatcttcatcgagcagatgaagataaccatcgcacccaggacgatgatgccgccgaccatgaagacgttggcataggtcgaggccggaccggattcggtgccgaacagcgagccgccgctcatcgcgccattggccatgagctggccgaagatcgcgacaccgaccgaaccggtgatggcctgcatcagatcgttgaagcccaatgcacgtccggattcctcggcctccacggtcagcgttgcggtatccacaatcggctggtagaagaacgaggtgccgaagtagtagatgcacggcgccacggcaagagcccagatctggcccatcggaatcaggaacgcaacggcgatcaggccaccgcccatgcaggcgagcgccagaatgatggaggccttgcggccgatcttctggataatcgggccagcggcgaagcccatgatggcggcgaggatgatcgaccacaccagcaggttggagacctgggaggagtcgatgccgtacacgttcaggccgatggcgttgcagccggcgttcagggtgtagctgaagaagtagccgacaaagatgacgatcatggtcatcgcgaaggccgggttggtgagcatcttcggggtgatgaacggatccgcggccttgttgatgtagaccacgaaggccacgccggtgaccagcaccgcgataccccagaagatggtcatgtcggtgaagaacatggtcaccgagccggcgaacaggccaatgagtgtgaagccgatcacgtcgatgcgcgcgcccttggcatgctcgtcaggcaggttcttggccaggatcgggatgaagaacaccgcgatgatgccgataccgaagaggatgcgccaatcgacaagggtcatgtagccggcgaggaagacacccagagccgcggcgatacggaacacggcgacgaacacgccgtaccagatgactcgcttcttcttctcgatgtacttggagacgagcaccaggaagatggagccggagacctgccagcctgcggactgcacggtacgggcggcgatgacgatccagatgctcaggtcgccgaagcagccgaggatcgaaccgagcacgaacacgatcgtgccgagaatcatcatcttcttcagggacacgaagtcgccgagagaaccgtagatcacgcacacgatgccgagcacgatgcccggaatcgaggtgatcagcggggcgaggttggcctggccgagctggtcgccgatgttcacataaatcatgccgaaagcctgctgctgcagcacgcccatggtgaagatgatcagtacgatcgggatggcgatctttgccatcttgttcatacgggcaaactcttcggtgccctcctcaggcaccgggataccgttcgccttctccttgacagcggtttctgccatggtgattcctttctattggtttgagtttggtggaatgccttatgcgcgagcgcaaggagtaaaaacagctacctcctctcgcatgggaatcgacggcgccgcgcctcttctggataccgcgagggccgaggccttcgcggcggaatcaagtgcatgggcgatgggttcgccggacatcaggtcggcaaggagataaccggtgaaggtgtcgccggccgccgtggtgtcgaccgtgtcgacgagataagcggactgcgtgacgacgtggtccccacgcaaatacatcgaaccgcgctcgccgagggtgagggctatatccgcccaggagaaacgcgcacgcatcgcacggatcagtgtctccccgtcttcttcggcccctgtgagcatcgccgcctcgccctcattgagtacaaaacagccgatggcatcaagatcgacttcgtcgagccgcgagtcagccggcgagggattgagcacgatgaacatgccgcgggccttggcgcgggacacgatatagggcagttcgctgatttcgttctgcagcagcagccaatcgtccttcccatacccgtcaagcacctgatcgacgaaatcacggtcgatggcacggttcgcgccggggtacagcacaatgcagttgtcgccgctggcatcgttttggatgatggcgttgccgctgcgcacatcatcgcgcactaccgccgaggtcacgcccaccgcgcaggattcgagcaggtcgcgtaggaacatgccgtcccgtcctacctggccggcatggtgcacatcggcgccggcacgagccaatgcgatcgattgattcagccccttgcccccggggaacacgtcgagcgaatgcgaggtgatggtttggcctttggccgcaaagtgatccaccccgtacacatagtcgatgttcagcgagccgaaattcagtatgcgcatcaagactcctttcccatgacgggaccggtgagagccagttcgtagatgcgacggcaatcgtcgcgatcaaggcgggcaatggatccgatggtggcgtccggcccgtagaaatcgatgttgtccaacatgcgttcgatgccgtcgcccggcagatcgaagtccttgaaggaaacaggcatgccgagcgagcggaaaaacgattccgttgcggcgatgccacgccgggccagttcggtttcgttcatcgagccgggcctggtgccgaatacctcagtggcgtatcgcgcgaaacggaacggggccttctcgctagccacgcgcatccaagatcccatgatgattgacagggtggccccgtgaggggtgtcgtatagcgcgctcagctcgttggcaatcagatgggtggaccagtcctgttcacgacccacgccgagggtgttgttctgcgcgatggtggagatccacatgatttgcgctcgcaagtcgtaatcggcaaggtcggccaacgatttcgggccgacatcgaccaaggtgcgcaatgcgccttcggccatacggtcgatcacgccgatctcgttgccggcgctgaaataccgttcgcagatgtgggagaacatgtccacaatgccgcaggcagtggggaacgccggcaccgtgacgctgagttcggggttcatgaacgcgaatgccggccggagcactggttcgctcagcgtgagcttggaatgctcatgctcattgttgatgacggcgacctggctggattcgctgcccgatgccgggcacgtcagtaccaccgcgacgggaagggtgcgctctaccggcactttgccggtgaaataatcccatacgtcacgctctccggcagctcccagcgcgattgccttggccgaatcgatgacgctgcctccgccgatggccacaacggcgtcgacattgcgggctttggcgatggcgatgccttcacgcaccagcgtcagtcggggattcggcttcacgccgccaagctccgtgtaggaaatgccggcccgtccaaggctgtggcgcacggcatctagcaagccgctggcttccaaatatgctccgccatcatgatggatgagcacgcgggaaacgccctttgcgcccagttcgtctcccactttggtttcggcgtcgcgcccgaaaacaaaggtggttccgatgcatatggtgaaatccctcatatcatgctccttgcgtgtatgacggtgtccgtcatgatgtcgttgagttccgcgatgtcgcgcgccacatatgcggggtttctgctgagcaacgcgatttcgtcgccatccccgtatgtgaccgctatgcaggagatgccgttggtccgtgcagcttcgatgtcgctgaaggtgtctcccacatagaggcattgtctcggcgcgatgccatgccgtcgaacgatttcggccatcatttcgaccttcgtcgcctcacggccgggtatggaatcggggcagatccaatcgtcgaacaggttcgcccagcctttgctgccgagtatgcggctcaatgcgccctccggcttgttggtgacgatgatattgcgtacgccatgttccttcagctcattcagcatgctctgaatgcccggatagagtctggtgcgcgaaaaatcattgagcgtgcggtagtgtacgcgtacatcctcatcaaatgtctccagatacgcctccccgggataggggatcacgtgccgcatgatctcatccatcggatcggccagattggcgtcatcgcgcatgtacaggtcatcgatcgccccacccgcacgacgcgcggcgtacgtcagggaattccacacgtcgctgccggtgtcggcaagggtgccatcaaaatcccataacaggcatcggtattccatcggcctgctcctttcgttcattcgcatggcggcggtcgatgatcgagtgtgagataccgccggccggccagaaggggttggaatcgccggccggcggtggagggggttgttcaggggcaagactcagtcgtagttttcgagggtgctgttcagcaaatcaacgaatccggggaagtcgagttccagcgcggcttccgcattcggctcttcgccgcggtaacccatcgtcggagtgcgctcaagatccacggcaggcacggtgccgcgcagatgacggtagtcgcacacggtcatgccgcgggtgagtgtgccgtgcagctcgatatcgatatgcatcgggaccgcagtgatcagcgacgggtcgataacccatgccaccgcgcatgcgtcgtgcatggtggcgcccgtcagctcggactcctcctcgcatgcgccgatgaagaaatcggtcaggtcggcggccaggttcgcggccttggtgccgatctcacggaacttggctacgtgcttggcggtcagctcgcattgacgagtcaggttgatgccagtcatcttgacgtgcatgccggagttgaacacgcgcgacgccgcctcggggtcgacgaagatattgaattcggcggcaggggtccagttgccgtaggtgacggacccgcccatgatgcacagttccttgacccgttccacgatgcgcggctcacggttgatggcggaggcgatgttggtcagcggaccggtggcgatcagcgtcacgtcatccgtgttcattacggtgtcgacgatgaagtcgaccgcatgcttgttctgtgcggcgtgcgtcggttccggcagcacgggaccgtccagaccagtctcaccgtggaactgcggtgcggtgaccagcggtgcgaccatcgggcagctgtgccccggatatacaccaatacggtccgccgcgccaaggacctcaagcaccttgatggcgttgcgggtcacgttctccagtgtgcagttgccgccaatggtcgtgatacccagcacgtcgaggtgctgcacggcgagcatgatgccgaacgcgtcatcgtgtccgggatcgcagtcaaggatgaccttcttcttgttttccatagggatacctccgttggttgtgttctttggattggtcgatattcgggtatggcgttcagccggtttgcccgacgagaaactcgtgcagctgcgcggcgtccggcgaggaacgcgccccgcggcgggccactttgtacgcggagacggcattgccctctcgcaatgattcggcgagggaggctccggcgagtctggcagcgatgaaaccggcgttatagacgtctcccgctccgatggtgtcttcgacgttcacccggaacgccgggctttccgtcaggccgtcttgcgtaagaccgatcgatcctcgggcgccgtcccggacgatgacggtccggccgcccaccgcataggtcgtggcattgcccatcatgtcgtcgtcgcctaaataggcgaactcgtccggccccgatcccagcagataatcgacattcggaataatgcgttcgagtgcagccgcgaaatcggggtcgagcacgccgtcatccacacgaaggttcaggtcgaaggatgtgggaacaccggcatcgtgggcctgttcgaagatgcggatgatcgtctccctggcactggtgtcgtaggtcaggcacatgcctgaggagtggacccaatccgcctcgcgaatcatgtgcatcggcacgaggttttcgtcgagcaccttgaacgattgccgttcgcggggccatccccacaagtacctctctccgcggtcgtccacgaaagcgaatacaccgaccgtgttcagggtcgaatccgcaaccagcccggtcacgtccacgcccgcatccttgaagtcctgcatgacgaaacgcccgtactggtcatctcccacggtgcccacgaacgatacatccagaccaagctttgccaacgccacggccgtgttcgccgaggttcctcctccctggatgccgatctgcggatattcgacctgcgtgcgctcctcgttaagaaaacgcgggtatggcacgatgacatccacgttggcatcgccgacgacaacgaccttaggcatctttggccgccttgataaaagcctcgacctttgccgggtccttgcaccaatccgtatcggcgcgatcatcgtcgtaattggtcagggagaacgagtcgacgccatacggatgcgtggcgtagatcgcctcggccacattggaggcgtccagaccgccggcgatgatgcacggcacgtcggtggcttcgatgatggcccggtcgatggcccggtcatgggtcaggccggtcgctccgatgtctccggcagcaggtgctttagtgtcgatgaggaagaagtcggaaaccggctcatagtccttcacatactgcatgaccttctgttctccgagaggcactccggccagcaccgggatggcctgcatgatcttcagttcagggaaccggctcttaagttccgccacttcggccggactgatgccttcgatgtcaccagacaggtgcagcacatcgggcatggcttctcgcaggttctcgctgatttcgtcgatgtcttcggcgacggtcaggcctatgcgcacggcctgtggttgcacgccttcgaagatttccctggcccgttcgcaatcgagctgaccgggcgtccgcttgattttgccgtaggagacgccgatatgttcgccgcccatgtcgattaccatgcgagcgtcctcgacattccttattccatagatttgagcaatgacatcagccacgatggttcctttcctgagcaatggcgttgatgaacgcggggacggagaacaccgtctccttgaggcctgcaccctgagccactcgggtgacgggcggcggcgtcacgaaggaacgccgaagtgtgtcggtctgggcaaacacctcgcgggtctggccatcgagcagcacgcggccgtggtacatcacgatgacatgggagaagttcgcggtgacgaatttcatgtcgtgcgaaatcgtgatgcagagtctgccttgtgctttcagacgttcgatgatgcgtgcaaggtgggcgttgcccgacgcatcctggccgcacgttggctcgtcgaagatcaccacggatgggtccatcatgatgacggcaccgattgtgcagaatttcttctcggtgggcgtcaggtcgaatgggtgcacgtcgagctttttggtgaggcctaccagctcggcgatgctgtccacgcgatgcgcgatgtcctgatcgcccatgccgatctggcgcggaccgaattcgaattccttgcggacgctttccagaaacagctgatcgtcgggattctgaaagacatagcccacgctgcgggaccattcggcggtgctgcgctcattgacgtcaatgccatcgatcagcactttgcctccggtggggcgcagaatgccgttgaaatgcttgaccagcgtggtcttccctgcaccgttctgccctatgatcgccaccggctcgttgccgtcaagcgtcaagtccactccgtcaagggccttgtcccctccgggataggcgtgctccagtgcctgcaactcgattttcatgagagcgcctccttggccatgcggatggccggctcctcggtaatggcaatcgggccaccgagcgcacgggtgatcttcacgtaatcgggcacttccacgccatgctcttcgatcgccggatcggagaacacctccatcggagagccaagggccacgacttcgcctcgctcgagcaccatgacggtatccgcgtatcgtgccactcgctccatgtcatggtcgaccatgatgacggtgacgccgtccgcattgagctgtttgacgatgtcgaaaatctcctcgctgcccatcgggtcgagctgcgtggtgcactcgtcaagcaccaaaatgcgcggttccatgatgaaagtggatccgaaagccacacgctgcacctgtccacccgacagttccagcgggttcttgtctaggatgtggtcgatgcgcatcaatttcgccacagcttcgacgcggtcgatcatctgcgctctgggcacaccatggttgcctaatccgtaggccagctcttcggcgacggtcccggcggtgtaggacagctggttgaacgggttctgaaacaccaggccgatggtcttcgacaattcggcgatggtcgaatcggcgacatcggtcccgtcaattaggatgtgtccagccctcgcccccacgaaatagtgcgggatcaggccgacgagcgcgttgcataacgtggatttgcctgccccattcgcgccgatgatggtgaagaagctgccttcctcgacttggaagtccacgtgtttgacggcccgacacttgatgtcgcggtacttgaaggagaaatccttgacctctactatcggactcattcacttgcctccccacgagaccggcgacggaatcacaccgatgcggatgcatacggaaacggcgaccacggcgatcagaaataggacgaaaatccaattgagtaccttgtcggcggcattccaactgaccttgacataactggtctgcttcactccagtaatgccgaagccgcgggtctccagggtcataccccgctcctgggcgtcggtcagcgatgacatgacaaccggaccaagcaacgggatatacgccttgatgcgggcgatgaccccacccgatgcatcgagtccgcgagcggattgcgcctcctgaatcaccgccatacgtcgttgcatctgcggcacgacattcaggctggcgagcaccaggtatccggccttggcgctgagccccaccgaagtgagcgcggataccatagcaccgacataggtggttttgttcatgatgtagaagctgccaaggaacaccagcaggctcaccaccactttggccgcatacagcacgccttcgagccccagttgcgcgaagccaaaatccagtaatgtggtacggttcttggggctgtacagcccttggatgaacatgagcatcacagtgacggggatgccgaaaccgaacattatcttggcgaaatcacgctgtatatgagccaagaacgagaccacaaacagcaacaccacgagtatcagaccaagcgtgaagtcaggccacgccaatgcggacagacccaaggcgaacacggccgctatcttggtgatcggattcaacttctcaattacggtgtcattgatgaccggcatatgcgacgacatgtcttactcgtcttcttcttcgtcatcatcactcagcgcatcattgttcgagccgcccacggagtcggccgcatactggctgagaaagcgacggggaatcttctgcacgatcacccatgcgatggcgacagtgatgcccttgtcgatgaggttctcgatcagcgacgaggagatcaccgaggcgagaatgtctttcatggccacgaccagcgttgccgtcagcaccgatgtaccgttgacgccggtggcaccgccgtatacgaatgcggtgatcagcgatgcggagatcgcattgacgagcgtgcacaccagccagatgaccacgacgccccacttcttgcggaacagtccggccttgaccatatagccgacgaccaaaccgcacaataccgacaccgccgcatagggaagatagaccgggttggccaccagtgccaggaaaagattggtcagcaggccggtcagggccgcgacccatggtccagacaggcatgcgacgacgatggtgccgatcatgtcgaggaacagcggcaacttgagtgcggagcacagagttccgccaatgagattgattccaaccgcgatcggaatcagcactagggactttgtggagaattgtgccttgatcccttcccagaacgacagcttccttgccatgctggccctcctttattttccaaccctcggttttccgcattgtgcaatctgcattgtttgccttgcggaatcttaggaaattattttcctaaaatgttttcttgagataagattataggacgccaacgtcagtgtcaacacggcgggtcgagggtcgcacaacctggaccgaacggcccacaatggcgacgtagcaaggaacagaacgctacgcccttgtacactgatacagaggaaaacaggcaggaggggagacatgaacatcagggacatcgcacgcatcgcgggcgtctccacctcgacggtctccaagatcgtcaacggcaaggattccagcatcagcgaggaaacccgcaagaaggtcctggcgatcgtcaaggaataccattacaagccatatgcctctgccgcgcagcgcacgcgcagctacaccatcggagtgctgctgcgctcccccatctctttcgatagcacgctggatggcatcatccaggctgcccagaacgccggatatgcgaccgatgcctacaacagctactccgatccggaacgtgagctcaaaaacatcgcggcaatatgtgggcgcaacgtcgacggcgtcatctgggagccggccaccccggacagtctcgcttatgcctcgcagttccccgaaggcaccccgttgctgaccataggacccaacggcggcgaccagtcactgctgctgccttataaagaggcggcctataaattgaccaacgagctcatcgaacgaggtcaccaacacatcgcctgcctaatgaccagaggccgccgcacacaggattttctcgaaggcttccgctcatgcctgttcgatcaccagctgccatatagcgacgacttggtctactacgacctcaacgattcactgcccagcaaaatcggaagccgtgacatcaccggatttgtctcctcgcattacaggcgagcactcgagttcacgcagatgatccgccccttgcattaccggctaccggaggacgcctcgctcgtctccatcaaaaacgacaccaccgaggcactggcttatcccggcaatgcggaaatatccacctacaccatccgcaactccgacttcggcgcctacctctgtgagaagctcattgcacagatagagcacgacaaagagcagcatccctcgttcgtacaggattttcatctcgacaacaccagcacggtcgccgctccgcctacttccgccgtcaagcacgtgttggtcgtcggcagcatcaatatcgaccactatctgtcgatgccgcggctacctcacatcggaggcacggtatccaccaaatcggcggcacgctaccccgggggcaaaggggtcaatcaggcaatcggtgcggccaagctcggacatcacgtcaccctcatcggcaatgtcggcgtcgacaatgggtccgattacattttcaaggcgatggagcagcatggggtcaatacggccggcgtgcgacgctgcgccggagaagacaccggttcgtcgttcatattcctcgaccccaacggcgaatcgattatcgcgattctctccggagccaacgcatcgcttaccccggatgacatcacctccaacgaacgactgttcgacaacgccggatactgcctgatacagactgaaataccgttggaatcggccaaagtcgccgcgatcactgcccgacgacaccatgccaaaaccattatcaagccctcgtcatgtgactatctgcccgactccatcgtcgccaacgccgacattctcgtgccgaacgagcacgaactggcaatcatcgaaactgagggaaaaacgatggaggataaggccgcgcatcttctcgaacgcggcgcgggctgcgtcatcgtcacccaaggagaacacggctgctacctgcgcggccagaatgtcgagtgtcactatccggccgctgacttctcccccgtagacagcaccggggccggcgacgcgttcatcagcgcgctcgcctcgtatctgatgtatggatgcaccgtgcggcaggcggtcgaaatcgccacctatgccgccggatactcgatcacccgcaaaggcgtcattccctcgcttatcgaccggctctcgctggatgtctacgtccatcacagcgagcgacagcagcgcggtcatctgtcttaaagcagttttcaccgcagacgattgaggggagccgtatctagtctgcggctcccctcagtcagcttcgctgacagccccccctcagagaggggagccaaaaaagcactactccagctccaccgcgccggtgtacagctggtagtactcgcccttctgcgcgatcagctcgtcatgcgaaccgcgctcgataatgttgccgtggtcgagcaccatgatcacatcggagttgcgcacggtggacaggcggtgggcgatgacgaagaccgtgcggcccttcatcaggttatccatgccggcctgcacgacttcctcggtacgggtatcgatggaggacgtggcctcgtcgaggatcagcgctggtggatcggccaccgcggcgcgggcgatggagatcagctggcgctggccttgggacagaccggaaccatcgccctcaagcaccgtgttgtagcccttgggcagcatgcgaatgaagctatccgcattaaccagacgagcggcctcgatgcattcctcatcggtggcgttcaggcggccgtagcggatgttgtccatcacagtgccggtaaacaggttcacatcctgtagcacgatacccaaagacctgcgcaaatcgggcttcttgatgccggtcacggaaatgccgtcatagagaatctgaccgtgctggatgtcgtagaaccggttgatgaggttggtcacggtggtcttgccggcaccggtggcaccgacgagcgcgatcttctgaccgggcttggcgaaccaggtgatgtcgtgcagcaccggcttgtccggattgtagccgaaggtcacgttggtgaagcgcacgtcgccgcgcagcagggtcagtcggccgtcgggcgaggtaatcgcctgttccttggcctttatcgcaacctcacgagccgaacccttgagcttttcggcggccttcagcgaacgcgtgccatcatcgccggcctcgcgcttccatgcccagtgaccggtctcatggtcgacctcggtcatggtgcggccatccgacccaagttccacgttcacgagcgtcacggtacccttgtcttcctcgatgggctcatccatcagcttgaagatacgggaagcaccggcgagcgccatcatcaccatggtcagctgctgagaaacctgaccgatcgggttgatgaacgaacgggacagggtcagcagggagacgagcgtgccgagggtgagcggcttgacaccggttaagccaatatcgttgacgccagccagcgagacggctgcgccgacgatggcaagcaggatgtagagcaggtagcccatgttgccgacgaccggcatggtgacgttgccccaggtgttcgcctcggcggacgcctcgaagagttcctcgttcttctcgtcaaaggtcttctgggtggcgtcttcatggttgaataccttgatgaccttctggccgttgacggattcctccacgaaggcgttcacgtcgccgatccactgctgctgcttgacgaagtagcggccggagcggctcacgatcttgcgcacgatgaagtagagcagaacggtgaacacgattacgaacgcggtgaatggaatggacagccacagcatggacagcagcgccgcggccgcggagataatcgaggagaacatctgcgggaacgactgcgagatggcctggcgcagcgtatcggtgtcgttggtgtagtggctcatgatgtcgccgtgctcgtggctgtcgaagtagcggatcggcagcttctgctggtgggcgaacatgtcgtcacggatcttcttgagcgtgccctgttcgacggtgatgatcagccactgccaagcccaggatgccacgatgccggccacatacaggcaggccatcagactgatggcgcgcagcaacggagcccagtcggggttcgattcccccaccatcggcaggatgtaagtgtcaatcagcgattggaggaacagcgcggatccggcctgcgcggcggcaccgaccaaaatgcacaccacgatggcgataacgcgcaatttgtattggaagatgtagccgaagatgcgcttgatggttccggggtcggctttgcccatggcgggctcgcgattcttgaaactctggtcgttgctcatcgtgcttctccttccttggtatcggctgcattggtatcagctgcgctggtatcggccgtgggcatggtcaccgtcaccgtcacggtttcggccggctcagcggcagatgactcagtggcagcctgttcggcagcggccaattcttcggtcttagcctggttcttggtctgggattcgtaaatggaacggtattcatcgcaagtggtgagcagctcctcgtgcgtacctgatgccatgatgcgaccggaatccatcaccagaatcatgtcggattcctgcacggaggccacgcgctgggcgatgatgatcttcgtggtgtccggaatctcgttgtggaatgcggcgcggatcagcttgtccgtcttggtgtcgacggcgctggtcgaatcgtcgagaatcagaatcttcggcttcttcagcagtgcgcgggcgatgcacaggcgctggcgctgtccgccggacacattggtaccgccctgctcgatgtacgtgtcgtacttatcggggaattcctgaacgaatccatcggcctgcgcgagctgcgcggcatggcgaatctcttcatcggtggcgttcgggttgccccagcgcaggttttcggcaatggtgccggaaaacagcacgttcttctgcaacaccatggccacctgatcgcgcagcgcctcaatgtcatagtcgcgcacgtccacgccgccgaccttgagcgaaccagagctcacgtcgtagagtcgcgacaccagctgcactaaagacgactttgccgaaccagtaccgccgacgatgccgatggtcatgccggagcgaatcttcaggttgatatcgtccaacacgggcttttcggaactgtcggagtagcggaaactgacgtggtcgaactcgatggagccatcggccatatcggtcaccgggtgagccgggttctgcaccgtgctttcctcctgcagcacctggcagattcgctcggcggaagcctgggagatgatgaccatgacgaaaatcatggacagcatcatcatggccataagaatctgcatagcataagtgaccagagaagtcagctcgccggtggacagacccagcgccgcattattgccggaagcgacgatctgctgcgcgcccatccatgcgatgagaatcatcgaggcgtagacgcacaccatcatgatcggcatgttgaagctcatgatgcgctcagccttggtgaaatccttgaagatgcgctgggagatgcggccgaacttggagacctcgaaggattcgcggttataggacttgaccacgcggatgccctgcaggttctcgtcgaccacgttgttcaacgcatcgtaggtgtgaaacacgcgctcgaatacggggtgcacgagcacgaccagaccgcacaggccgatggccagaatcgggatgcaggccaggaacaccatggaaatcgacggggagatacggaacgagaacagccaggccacgaccaccatgatcggggcacgcacgcccagacgaatgatcatcatgtaggcgttctgcaggttcgtcacgtcggtggtcagtcgggtcacgatcgaaccggtggagaaccggtcgatgttggtgaagctgaagccctgcaccttctcgaactggtccttgcgcaggttcttggcgaagcccgcgccggccacggccgcgtactttccggacaagaagccggcacccagcgaaaccatcgcgcacaccagcagaatcacgccgaacttgacggtggccggcatgctgccaccggtgataccctcatcgatcagcgaagccatgatggtcggaatcaggatttccagaataccttcgaccgccacgaacaccggagccaggatgctggctttcttgtattcacgaatcgaatggcccagcgtgcgcagtacatgtttgggcttgtccggttcgacagctttgcgcgcctgcgcgattgcctctgcggtatcactcattcgttctcctccttcgtgttagcaacctccgctccgtcttgatcgggagccatcaccacaggtgactgagggagtgtttgatgttcaaattcatgttgtgcgcggtcgatgttcgcgcgcatgcgactgacgtagtcacgtagggctgctttctcgctttcggaaaagccatcaaccaacagacgttcgacgcgttcgccgttcgctttgagatcggcgacgatggcgtccgccttatcggtcaggacgatacgcttgcaacgggcatcatgcgccaccgattcgcgggcaataagccctttcttttccataagcgccagcacgcgcgaagcggtggagcgggtgatacagaacttctgttcgatggtgtgctggtagatttcacgattccggttacgagccaggaacatgatgatatgcgcgttgccgccagtggtctccttagcggaaagcggcatgctctcaccgagatagcggtcgacggctttggtcaccgctcgcatctcaatgctgagaatatgctgatccattgtcctccgtaccatgcgaggccatgcgcgtatgcgccttcaccccacattgttgcatacgcaacaattcatgataaagagacccatatacaacagttgcatatacaacaatcggtgtgttgcctagacaacgaatcccacatatgccctatacacaaactggctcccttctctgaatctcagaaaagggagctggcagtttgcgtagtattacttgctcagcttggcgtactcgtcaaccatgaactgggcgatcttcttgccgcctccgcccagcagggtgggcagcgagttgatgggcatggagttgaggaacatgcgcatcatcgcattatccggaagcttcggcagctcgccggcctcgccggcggcggccacggcggccacgatcttggcgccgaacggatcggcctcccactcgccgtaggtggaccattcggtgagcggctgggtcttgccgtcgccatcgagggccacggcaacggtgtcggcaatgtcgcgggagctcacgcccacttcgatggcatattcgccggcctccacgtgccagtcgttgtacttttcggaccagtaggcgaacgcgcgctcgtcgaggtcgatggtcacggtcttggattcgccggccttgaggaacaccttggtgaagcccttgagctcgtgcttcgggcgagccacgtcggccttgcccggcacaacgtacacctgcacggtttcggcagcgtccacatcggaggtgttggtcacagtggcattcacggtggcggtgttcgcgccggtcttggcaacggcgacaccggtgatctcgaacgtggcgtagctcaggccgtagccgaacgggtagtcgacagccttgccgtaggtgtcgtagtagcggtaaccgacgaacacgccctcgccgtagtcaacgtggccttcctcgcccggccagttcagcatgctcgggtcatcgttgatgtccagcggaatcgactgggcgagcttgccggacgggctgacctggccgaagatcacatcggcgagcgccgggccaccggactggccgagcaaccaggattcgaggatgcccttggcgttcttggcccacggggccacggtgatcacggaaccgttggacagtacgaccacgacgttctggttcgcggcggcgacctgttcgagtagggtgatctgcttggcgggcatgtcgagggtgtcgcggtcgaagccttcggattccgcggcttccggcaggcccaggaacatgaggacaacgtcggcgttcttggcggtttccacggcttcggattcgagggccgggtcggccggttccagatcgagcgtgaagccgggggcgaagtcggccttgatgccgcgctcggcgagcgtgtcgaggaagctggtcatcttggtgggggtgatgtgggaggagccgcagcatgggcttgcgccaatgcatactcctttgtcttcgttatattcacggctccccctttgccgaaaaataagggagggacatctgagccagatgtccctcctgagatgaaaagccatgttttacagtcttctgcatgactatcatccactactttcgaagtggaatcggtagtggcttcggttggcccaaccgtatcacccagccactgggctaggcaccctgctttcgcggtattcatccgcgcggacgaatcaagtgccagcggcagctgacttctcatctcgaacccgcaacccaccccgccgcaaaggataggccgggtcacgaagctcattctctaccttacacaattggctcgaatcatgccaccagagagcaatttcgttctcattacaccatccaaccagcgtgccagacgtgagtgaaatcccaagggtcgaggcgtgacgtgtcggattgtgggtcgatggtaggcaagaaatcatgattaccacgtaattggtagctccaataaatctgcccggcggatgcgctccacgctttgcgctgcatggcggcaacctcgcggtaaatagagcctctgattgatgtactgtgcatagcgttttcctcggagcgaccgccatcgcccgaatgcttagcgatcatccgatttaccagattgttggccacacaccactcccccacgatcactggcgtatagcgcgctgctcggcggatacggcgttcattccagcgcacgaatagcctataacagctcatcatccatcgctccggaatcatacggaatagcggaaaatgttcggccatgaccagatagatatgcgtatcgagcatgacgccccgcatgccctcccgcacaaaccagtcccgccaacggcccagtcggaagccgtcatggaacacaatgacttggttctcggccaaaatcgggcgcaaccggcgatacgactcacggtagaaacgcttgaggaacaccattggaatcggcccactcctccgtgcttcaaagttatcctttgcctgcctgctcgatgacgacgtagcatacgtcaaccaatcgatcggctcattcagcacctcgataccgaacagcgccgcgcgatcgcgataccggcgagccagacaggccagcacattcaacgcataggcgaccgctcgcgggctatgatgccagcgcaccacgccggtgaggccgccgttgtcgaatccgttctgtgaaccgggcaccgtgtgcaggtcgataagaatcttgagaccggtacgctcagcccagtcgaacgccctgtccaagtactcgatgcagcccggatgaccggacacatccccgaagataaaatacggcacaggaatacgcaccagattgcagccatgcgcggcaatgttccgaaaatcagcttcagtgatatacgtgtcgcgatgccgcgtcagcagagcctccaactcagcagactccgtagcccgatgcagccagatctcgtccgcttcgccgctggcggcaaaaatccccggcttcatccacttttccagtaccagccagttgccgaggttcaccccattgatttgttcgccaatgcccagcgtgcccagtgccattaatgtcacccgcgctaatcgttcaatgcttcgccgtaacgaacgaccagcccctgattcacacgctcaaattcggggatgtaatcaacgatgatggcatctacaagacgccgggcgcgttcctcatcgtagatatgagcagaatcattgcgatcgcgcagcatacgcagccacaacgattcgtccatgaaatcgtaatattggaaagcggttttgagcacatctcgcggagaaccggaagcggaaacagggtctccctcataagccagcagcgccttgaacagtttccaaccaagctcaaactgcaactcgaacttgtcaatgatgccgctctggatgaaatcattgctgagatcctgttcgggagccttgcgcagcgacttcagtgcggaaacgtaattctcatattttttcatacaatacctttccgctacgctcaatctccgccctcagcgatgaagaaatcggctcatccagattgatgacatcaactttaagcagtgaccacagattgtcctgaaggttctgctccaagcgattgaaatcggggcaaccggccacggcaagatcgatatcgcttttaggccggttcacaccctttgcgcgagaaccgaacagcacgaccttgcgagcgccggcatcagcggcgaacgtacgaatctgttcgtacacgttctcaataggaaccatgacgcctcccgccgtatgcagaaaatcccggactacccgcgcttccatcatacggccgcggcccgctcaccgcacggagcccgaaccacccgaacgcggcgacgcagttgcgggaggcgggctggcgctgtagggtgtgcgggaagttcctgacgcctttttcaggaggtgaatcctcatgttcaccacgttttctctggccgttattctcgactgcaccgtacgcatcgtgcttggcacggcattgggcgcactaatagggctcgaacgccagttgcgcgcccgaagtgctcggcgtgcgctgggatgtggagcacatcaccacgtccgactgacgccggccgtcggcgacgcaacagcgcaacaagccgaaaagcgggatgcgacatcgaaccgcatcccgctttgccattaccgagccgttgtctgactcatctacgccacggtgaacgtggtgcgcttcaaatcctcacggcgcgaggagtggccgatgagcagttcgaattcgccgggctcgacgatgcggttggcgtccggatccacgatcgtgcagttcgccaccgggatctcgaaggcgacggtcttggtctcgccgggctccagtgcgacgcgttggaacgccttcaattcgcggtcggtccagctgtaggaggtcacgatatcgccgatgtaggcctgcacgatctccacgccggcacgctcgccggtattggcgagggtgatttcagcgtgtacggtgtcggcttcggcaaaggtgccgtcggcgttgcttgcgccgcccacgatggtcggctcgccgtatgcgaacgtcgtatagctcaggccttcgccgaacgcgaacgccggatcctgggtgaggtcagcgtaccggtcgccgtgctggccgcggatctggttgtagtagaccggcagctggcccgcgtggcgcgggaaggtgatcggcagtcggcccgacgggttggtcaggccaaagatgatttcggcgatggcctggccgccgcgcatgcccgggttcggcgcccacaggatggagccggtgccggttccagggtcgctgacgcgcttggcgaacacgccgtactcccccacgatggaggcgggcagcacctgcggcttggagctgatgagcacggtgaccatcggcttgccggtttcgcgcgagacggcggcgagcgcgtcgagcagggcgttctggccgccgagcagttcgagcgtggcggtggagcaggtttcgccgaccagctggaccacgtcgccgaccacggccacgatcagatcggactggcgggcgttggccacggcctcgtcgatcagggcctggtccacggcggcggagacgccgatcttcgggcggggctggccgtccgggtagaactcaccggcagggtcaggcacgaggtcgatgacgttcgcgccgcgcgagtagaccacttcgcaatcgtcggcggtgagctgggtcaggccgtcgagcacggtggtaatcatgtctcgaggctggccatccggcatccaggaaacctgaccggagttgccggtccagtcgccgagctggttctgggcgtcgtcggcgagcggacctaccacggcgatgcgcttggctttgtttgcggcaaacggcaaagcaccgtcgttgcgcagcagtgcgatggattcgcgggcgagctccaggttggtctgctggtgttcggccgaaccgatgactgccttgatacgttcggcatccggcagacgcgggtcttcgaacaagccgaggcggaatttcagagctaggatgcgagctactgcgtcatcgatcagggattcgtcgagcagaccggtttttacggcttcgatggcaccctcgtagaactgtggggtggtcatgaccaggtcgttgccggccttgaccgcgtcggctgcggcgtgcacgtaatcgggcttgacgtgctgctcccatacggagcggccgacgttgtcccagtcggtgatcagcgtgccgttgtacttccatgcgccgcgcagcttgtcggtcagcaaccatttgttgaatgtgaccggcacgccttcaatggactcgtaacccagcatgaacgtaccgcaaccttctttggccacgcgctcgaacggcggcaggaaccaggattcgagcttgcggtgggagaggtccgcttcggaggcgtcgcggccgccttgggtttcggaatagccggcgaaatgtttggcgcaggccaggattgcgttctttggcagttcctcaccggccttggcaccgccttgatagcccttgaccatggcggaggcgagttcgccgatcagcatcgggtcttcgccgaaagtctcatccacacgcccccaacgggtatctcgggcgatgcacaacacaggagaaaacgtccaatgtacaccggtacaagagacctcctcggcggtagcacggccagcggccttgaccttgtctggatcccagctgacagccatgccgagctgggacgggaaaatagtggcgcccggccagaaggagtatccatggatgcagtcatctccgataatcaacgggatgcccagacgcgtcttctcattgacggtcttggcggcacgagataaatcctcgggactggtatgcagaatggatccgacatgcttattcacgatgagatcctcaagatcgccgccgcgggcgtcaagctgcatcatctggccgaccttctcctcaagtgtcatacgagagagcaagtcggcgattcgctcaccagcgggcaaatcaggattcttgtacggtaaggtttcagcagttgcggcaggcgtagtgttgtcggtcatacgaagtcgctttcctcagtgaaatcgaacagttttttaattaccaattggtagtttatctattgacagcatacaacacgcttatgccgcgcgcatcacatacaccaaaacgaccgtatgtatgcgaccccttcgttcgcccgcatacttactgccgctatcaagcacaagcatcggttcaaggcacacagcgaatcagcgatacccgtcccatatcggcgaaggaaatatcgccggctccagatcggcccattcatcgcataagtcaatggccggcccccgtaaccacctcagttgcacaccatccatgatctccagagcatggcgcaacgtgggccggacctcctcaaacgaggtgaattcggaaggcaggttccagttgtatgtcgaatagtattgccatattgaatcccgacgattggcaaactcgtcatgtaacggatgcgcaggattgaacgattcgacctgcaatatcgagaacagctgaacaagcatggggcgcgtggaattgcaatgtaccaagaacctcagatatgcgggcaatctgaaatcatcgggccctgaaccaggcaggccggaggccatgaagtcttccacactgccaaacgtgttgtaattctcgtgatacaccgcggcaagcaggttatctttgctaggaaaatatcgcaaaactccctgcttggtaacaccgaccgcatcggccacatcctgcacagaagtaccgttgtagccacgctcggaaatcagtcgcacggcggcatcgagaatttcctgccggcgttcccccgacgacttgcgaacacgcttatgctgcaatgaattcccagctgtcatatccgccagtctatccgcattctccccactcccatgcgcaaccacatccaatatccttggccggatatgcaaaacggtgccaaaacaaaacattctgtcatgccttcgacaccgatatcgcgcaatagttttttctgtatatgcttcttcgcttactcctggaacacgtcggggtgcttcagatcgccgggaatgtcggacaagaggccctccaatcccaagaattccttccagaaatcgagcggctggccgtatggcgaagcctcgcgaccgtgggcctgaatgttggccttggcctcgaacacctcttcctcgctgatgccctcgaagtagctttccagacgttcacggtgctcaggcacgtagaacagagaggacacaatctccgtcagacgctcggcacgctcgataggcagtgaatcccagtgacgcagttcgatgaagttcttcagacgtacgtcattgaagtgcgtggagatgatgtggttgatctcgtacgggttgagttcgcggtctgggtacacctcccccgcgttctcacggaacgacgggcgatgcagttccttggggcttgctccagaagccacagcttcaggggtatgggtcaggtcagcgaacataagcggcgtggacagcacgtcgatggcgtaatcctcccaaccatagcgatcatcgaacaggccgggcagcacattggtgcgctggaagtccagataatcccacatacgctggcgcagcagcggccatgggttcgtctcgccctcaaaatacggggtgttacggaagaagtaggccagaatcggaccgataaccgtgcccagacgcaacttttcgatggagtcgcgctcatccacataatcaatgctgacctgagtggaggcggagcaacgcatcatgcaggggccaaactgacccacgcggccgaggtagtcggtcattgcatcgtagcgatccttggggttgaccggcacatccgcaaagctggttttgggctggtaaccatagttgaccaagcggaagtcgagatcgtcaagaatcgggtcgagctcgcgacggaacttggagtacagcgtatttaggtcgctcggcttcttcaaaatgccgattgaggtttccacctgtccgccgggctcgagagaaacggcgacgccggaacggctgagacccaccagatggccgttctcccagtattccttctcctcgtcgtagtacggagccaagcgtttgagcaatgcctcgatgccattcggctcgtagtagcttacggcagtgtcgtcgctgttgtgcacgggcaggtgctcgatctccacaccgaagccaccggtgccacgctgggagcgaccgttctcaaaaaacttgagcaggctctcgacatgcttggggttcggcttggcgagtaggtgcgcgtaactgattcggggagtaaccatgctttgtatcgtattcgagccggccggcgcgcgtgcccgaaagcccgcaatacgctatacgaaaaaccgatagcaggctccggcccggtttctcgctctagagactcccctcagtcgctgcgcgacagctccccccatagaggggagcttaagtgtatgtgcgttcagtccgcggaggtgaagccctgcggctcgccggtctcggcgaacttggcgttgtgggccttcttggcagcggcaatcatcagcttgatacggttgagctgattggcctcggaggcacccggatcgtaatcgatggagacgatgttggcttccggatgcagacgacgaatcttgccgaacatgccacggccggtcacatggttgggtaggcaggcaaacggctgcgcacaaatcacattcgggcaaccctgttcgataagctccagaatctcagcagtcagcagccagccctcgccggcctgtacaccgatggaggtgacttcagcagccttcttgacaagctcgggcatcggctcgtcctgcttgaacttgccgtgcgaggtggccagtgcggccttgataggcgcgttgtacaggtcaagacccttgcgcatcaaggcgtagagcgtcttgttaccacccataccgaggttcttctcattccagtcggtgatgtaggggcgggtggtcatgaattccatgatgccgggcactacggcctcgcaatcctgggattcgatgacgtcgaccacatggttgttcgcgtccggctggtacttgacaagaatctcgccgaccacgccgacacgcaccttgcgtggaatatcacgcagcggcaatgcatcaaaggatttcacgatctccttggccagcacgttatacggcagatagcccttcttgatgctcggcgccttggctgcggtcttggaatagccgtgatgctcgatggtctcacgcacgatggtgtcccacagctcgtacagcttgttggccgaacctttctccacctcatacgggcgtacgcggtagaggcacttcatgagcaagtcgcccagaatcagcgccttgatggcacggtgcagcaggggcagggtggccttgaagccggggttgtcttcgaggccctgggtagaaatggcgatgatcggaatctgcggatagccggcatcgaccaaagccttgcggatcaggccgaagtagttggtcgcacggcacatgccgccggtctgggtgatggcgagcgctacatggtcgggatcgtatttgccttccagaatcgcgtcgatgagctggccaacgaccatgatggccgggtagcaggcgtcattgttcacgtatttgaggccggtttccacatcgccacggctcgcgtgcttcaggatgtcgaacttgtacccaccggaacgaatcaccgcttcgaccaaggacatatgaatcgggctcatctgagggccaacaatcgtatagttcttcttcatgtccttgacgaacttctcacgatgcgcgtatcgggacatggtggcgttgttgtggccggacttcttggcattcttggcgttcgccacgccggtggtgccgtccgaagtgccattcttgtgggcgactgcggcctgtaggtcgcgttcggcggcacgcttggaggcctcacgcatcgacttggtgagattcgggttggcggccatggtcgtatcgagcagaatctgacggcctggagtcggcgcggtggaaccggtcctgcggaaaccgatggacttagggccctgcacggtctttgcggcggtagcctgagacgtcttgacggcatcctgcacggccttggcttcggcatcgaccttcttctgcgcggcttcaacggcggcctgcgcttcagcgagtacggccttggccgcttcaagatcggactcggccttgaccttggcctcttcagcggcacgctcagcagcggcctgcttgtcttccaaggccttggcagcagcttcttcacgagccttattggcttcgcgttcctcgacggcggccttgagcgagcgcagtcgaatcttggctgcacccaggttggagacctcgtcaatcttgagcagcgtgtacacgtccgccttgtcggccagaatctcggccacctgatcagtggtgatggcgtcgaggccgcaaccgaaggaattgagctgcacaagctcgaggcccggatacgaggccacgaagtgtgcggccgcgtacaggcgggagtggtaggcccactggttggtgacgcgcagcggcatcttggtgaccgtgcggtctcccacgtggcggaatccggcggcgttcttggaacgtgggtcggcttcgccctcggaaaggaattcggtgaggttgagcttctcccccggctgcagttcgcagatggaatcctcggagagcaccaccatgccgagcgagcagatggtttcggggatgccgtggttgatttcggggtcgatgtggtagggacggccggcgagcacgatgcctcggcagttgtgctctttcatataggcaagcgcggtcaaaccttcctgctgcacgtcatgcttgaagaccttgtcttcggcataggcagccttgaccgcggtttcggcctcttcgcgggtcacgttggcccacgcaaactcttcgacgacgcggtcaaccatgagctcatggttggcaaggttgaagtacgggtgcatgtaacgcacgtcatcctcgcgcagctcaggcatgttggcgccgacgacgagcggatagttggccacaaccgggcagttgtaatgattgtccgtgttgggcacgaggttctcctcgtagctcacgcacgggtagaagatggtcttgatgcccttgttgatcagccacttgatatggccgtggaccagcttggccgggtagcagatgttttcggaagcgatggattcgatgccggtctcgaacagttcatgggagctacggccggaaatcatcaccttgaagcccagcgaggtgagcagcgtgaaccagaacgggtagttctcgtacatgttgagggcgcgcggaatgccgatctcgccacgagtggccttcttgtcggtcaaacggcggtaggcgaagcaacgcttgtacttgtagtcgtacaggttcggacggtcggaacgcttcttcttggcgtcaccaccgcgttcgcaacggttaccggtcacgaagcgcgaaccatcagagaacgtggtgatggtgagcttgcagtggttctggcacagcttgcacacgtcacgctcggtggtcatgctcatattgtcgagtgcgtcgccggtcaggatggagctggcggtgtgggtcacaccgtccacgacaacgacatggacttcgggcttggccggctcagtcttcttgaaggctgcggccttgggctcggacttgagtgcgggctcagcctcggactgttcctcggacccatcggccttaaccaccacatccaagtggtcggcctcatcctgatagtgcatgcgggcggtcagggcggcaccgaacgcgcccatgaggccggcgatgttcgggcgggtgacctgacgttcggtgagcagctcgaaggcgcgcagcacggcgtcgttgaggaacgtaccgccctggaccaccacagtgtcgccgagttcgccggaatcacgcagcttgatgaccttgtacaaggcgttacgcaccacggagtagcacagccctgcggcgatgtcctcgatggacgcgccttccttctgcgcctgcttgaccgaggagttcatgaacacagtgcaacgcgagccaaggtccaccggatgggtggatgccaaagccttttgcgtgaattcctgaatcgtcagccccatagacatggcgaaggtctgcaggaacgagccgcagccggacgagcaggcttcgttgacggcgatcgagtcgatgacgccgtcggtgatggccagatatttcatgtcctggccgccgatgtcgatgacggcggtgacgccggggctgaccatttcggcaccacgatagtgggccatggtctccaccacgccctcgtccaggtgcaggccggtggtgatgaggccttcgccgtaaccggtggcgcaggagcgtgcgatccatgcgccttcgggcagctcggattggatcttcttgacgatgttgatggcggcggtcagcgggctgccttcgttgttggcgtagctggaccagacgatttcacggtcgtcgttaacgagcgtggccttgatggtggtggaaccggcgtcgatgcccaggaagtgcgggccatgcgcgccttcgagggtgccgatgtggatgtgttccttatggtgacgcttgttgaagtcctcgcggtcggcctcggtgggaaacagcggcggcatggtgggcgtgttggagggcaggtttttcagctcgtccaaacgcttcaggatttcgtcgcaggtgtaggccttgaaatggtggccctgatcgtcggaatccgtgtcggcccgcaatgccgaaccgtaggccacatacaggtgggcgtcggtcggcacgatgaactcgtcgaccttgccttcaagggcacgctggaaggcggcgcgcagttcggacatgaagaacagcgggccgccgaggaagatgacggtaccgtggatcgggcggccagaagccaggccggcgatggtctgcgtggccactgcggtgaaaatagaggcggcgagatcaggcttggccgcgccgtcgttgatcagcggctgcagatcggttttggcgaacacgccgcaacgcgaggcgatcggatacaggttctcgtagctcttggccatctcgttgaggcctgcagcgtcggtgtcaagcagcgtggacatctggtcgatgaacgcgccggtgccgcctgcgcacgaaccgttcatacgctgttcaggggtgggtttcaggtaggtgattttggcgtcctcgccgccgagctcgatgatgacgtcggcttgcgggtactccttatcaatcgcctcggtttcggcgatgacctcctgaatgaaaggcacatgcagattgtcagcaagcgccagaccgccggaaccggtgatagacaggcgaatcggttcatcgcctcgacctagttccacgagctttttatggatgtccgcgagcagaccggcaacggtggcacgcacattggcatggtgacgtcggtaatcggaaaatagggtgtctttcagggaatcggactgatcaagcaccacggccttgacggtggtggaaccgatgtccaatcccacacgcaggggcttcgggtgtgaagcgggctttacgctcgcgtcagtgacgatgtcaaccatgtgttcctcttaattccgacttccgggagtgcacgtcacgaggcatcaggaaccgtttcgggacggctggcagataccctgcggacggcttcgcccggctacttcttacggaatattagtccgaccacctacccaacatgacgcgggcagaggtgatttcgctcacgggaagggcgtttcccaacagtttcgacgatattgctgagtgcgagttaatgaaaagctactacgaggcttgatggtcttcgccggcttcgcgatctttcagataaatagaaggaatgtcgcgttcctgatcgtgcagtttggcccagatgatgggcttgccggccgcaagggatttgggcacgtcaaggatgcgttggtttctggaaccgcggaattgcaacaacgagtctttttggtctttgagatagcgaccgtcgacaaggatgtcgataaggtgcagcagttcgagtttgtctggggtttcacccggccgcatgagttcttcccacgtgtagccggtccatgaccagatatctttggtatgaccgaattccttgcgaatgcgctgtgcgagaggtactagcacaggggtgttgaggaacggctcgccaccaagaaacgtaatgccttgcacccatggggctttgagatcttcgatgatcttgtcttcgagtttctgcgtgtactcgtggccggcctggaaatcccagatggaggcgttgaagcaattgacgcagtggaaagggcaaccggaaacatagatggagttgcgcacgccttcgccgtcggtgacgatgaaggtcttgtagtcggcaatcatgcgcttggacatgcgccggccatcccattgaccggctttcggatcattggccaggccattggaaggtatggaggggccgcgtccggtctcgccggccgcaaagtcatggcgcttgggttcgggcttggttgtcacggccatgattccctccttgcggaaaatgcactggctcccgctggcgggagctgtccgtcatcaaacggactgagggtggtcaacactataaggatgaccaccctaagtctcgcttacgctcgacagctcccgccagcgggagcgagtataaaccttacttagcttcctcgaaccactcgcgggtggtgccgtcgtccagggtcacgcggccagtttcgccgctcatgtgcttgacacggtgggcaatctcctcgtgacggccgtgcaccatcgggcgctggaccgggctgccgaggtagccgcaggtacgcttggtgacattgcacttgtccgggttggagttgccgcactccgggcacttgaagccttcctcggtcggctcgaaatcaccctggaagccacacacgaagcagtggtcgatcggggtgttggtacccagataaccgatgccgatgttgtaggcgtaatcccatacggcttcgagggccttcgggttgtcctgcaggcacgggtactcgcagtagttgatgaagccaccggaagcgtagtacgggaagtccttctcgtagttgagcttctccatcggagtgggctgcagccataccgggtagtggaaggagttggtgtagaagtcgtggtcggtcacgccctcgatacggccgaacttctcgcgatccatgcggttgaagcgatcggtcagggactccgccggggtggagtacacggagtagtggtagccttccgacttgctccactgcttgcacagctcgttcatgcgcttgacgatggacagtgcgaattccttgccttccggatcccagccatggtcgcgaatccagttcttgccatagaagaccgcagtggtctcggcaagaccgatgtaaccgagtgaaacggtggcgcgctcattcttgaacagagcgtctacgttatcgttggcaccgagacgaccgaaagcaccaaaacgaaacagtgtcggagcattgaccggggtggcttccttgcaacgcatgatgcggaactgcagagcctggtgagccacttccatacgctcgtcgaacagcttccagaagcgggccttgtcgccgtgagactcgatggcgatgcgcggcacgttgacggtgaccacaccgaggttcatacgaccgtcttcctcgtccttgccggtctcaggattgatccagccctgcaggaaggaacggcaacccatcggggctttgaaggaaccggtgatcttgacgatgttctcatagaacaccacgtccgggtacatccgcttggtggcggattcgagtgccaactgcttcaagtcgtagttcgggtcgcccggatcggcgttcacgccgtgcttgacggtgaagacgagcttcgggaagatggcggtgtggtgttccttgccgaggccgcggatgcggttgagcagaatggcgcgctggatctcacgggagaaccagtcggtaccgagaccaaagccgacggtgacgaacggggtctggccgttggatacacggttggagttgatctggtattccatggtctgcatggcatcgtagatggccttgcgggtacgaatcttggcgaggatctcgcgctcctgctccagctcgtcaacgtcagtgtggaacggagtgtccatcggcagcggctcgcgggaaccgaagtgcagcttggccggctcgttcttcttggcgctctcgacctgacgacgagcgaattcaaccggcatgccgtcggggatggtctcacgggcttcctcaaggaacttctcgtagtccttcttggcgtaccgagcaaggtgctcgtcggcacggttggcggtctggccaccatactggctggaagccacatccttcatgatctgagtgatctgggtggcggcgatggcgatggacttcggggatgccatcggagcgttgcccagggtgaaaccgttggccagcatgtcccaaaagttcggcagggagcagttggactgggcggtgaacggcgagtagtcggcatcgtggaagtggatgtcgcccttcatgtgggcgttggacacggccggcggcagcatgttgaacgctgcggccttggacacggcaccagccagcaaatcacgctgggtggagtagacgttggaatccttgttggcgttctcgtggattagggtcggatcgtggttgatgaagcgggagacggcctcgttgacatcggtggccttggcacgctggatgtccttgtcgagacggtaattggtgtaggcacgagccacgtcgtacaggtgagcatcaatgagggcgtgctcaacgaggttctggatgtcctcgatcttggcgggaccagcgtaacgctccttgatctcgccttcgacctgatcagcgaagccgcggatcatggcatcttcctcgggaccgacttccttgttcaggtcgccgaaggcggacttgatcgcagagatgatgttgatggggtcaaaatcgaccacacgaccatcacgcttctcaacgagaacggtggaggccttcgcggccgccttggtcccattgttggtgacgttctcctccagcacctgtgcgcccatcgggcacccctttcctcatcccgcgcggccttgcggaccccgcgttttcagccgcactcgtcgtgggccatacgaaattacattgatgtcgttttcttgaacctctagaagaatacggcaagctcacccctatatctagtgcccaacaagggtgtgttgaactatttatagtggtttttggctattttccgccaaaactacatctgtgtgattagtgtaactgtttcttccctagcgtgtcgcactccaccttccatcgattcctctcttttcggcattacccatcttcttggacgggacaacaaagcgtcgttaccgcctccatacgacaagcatgacgcacccatcacaggaccggtagatttctaccgccatcgcccaccgcacttatagttaagggcatgactactgcaatgggttactcgaacacgggccagtcgccgaccgccgcatctttggcctcggccggttttggccccaacacggccaccgaagccgggcagggaaccgtcaacctgcccgacggcccgcggccggtcgaccagctcccaaggcttgccgcagagaccaccgcgcagaatccctggccggtcagcatgctgagccagaaattctatggggcggtggagcgctggccgtccgcgtgggtcacgggccagattacccagatcaacaccagacgggccggttcggcgtatatcaccctgcgcgacgatttcgaagacatcgcaatggaggtcaatggctttggacggtttgccgacacggcccggcaattcgttcaaggcgatcgcgtggtcattcacggcaagcccaacctgtggatgaagcgcacctccctctctttgcgcggagacaccattcttaaagtcggcgcaggtggcagcctcaaggccatgatcgacgaattgcgcaagcgactcaaaggagaaggcctatttgacgcagaccataaactccctctgcccgaatttcccaagaccattggcctaatttgcgccccacaggcacgagccgagggagatgtcatcactaacgtgaatcttcgctggccctcggtcaccttcaaggttgttcatgtgcatgtgcaaggtgagcaatgccccggcgaagtcgcacaagcgattgcacgactagacaccgatccagatgtggatgtcattatcgtggctcgaggaggcggctcattcgaggacctcatgggcttctcggatgaacgcgtagtgcgtgccgcatatgcctgtaccacaccattgatttcctccatcggacatgaagacgattggaccctcctggatctggttgccgacctgcgtgcttcaacccctacggacgcggccaaacgtgtggtgccggacgtcaacgaacagacgcagctcattaccggagccatcgaccgtatgcgtctgagaattcgctcacgagtggataacgaagatcgcctcatcgagggatacgcaaaccgtcccagcctgacgcaacctctcaccatgctggagccgcatcagcgcttgattgacgattccatacagcgccttgatatcggcctgcgaagaatcgtggacgacgctcagctcaccgtcgagaaggcgcatgcctcactgaccgccctcagtccccagtccacgctcaaccgcggctatgccgtggtgcaaaccgccgatggcaccgtactcgatgacgcttccaccgctcatatcggagacgacatcaccgtaaccttgaagaagggtgtcatcacagccacaaccacatctgccgcagcgtaagaacgctcacagagctgctgcaagagaaactcaatgcgtatatagataaggagcacacaccatgaccgataacaccaacaccacccctgcgtcctcactatcagacaaagaacgcgagctcattgcgcagatgccttatgaggaggctcgagataagctcatccaagccgttcagtcgctggaaaccggcggactgaatctcgatcaatccatgcgccagtgggaaatcggtgaagcattggccaaacgagcccagagcctgctcaatgatgtacgcgccaagctcgatcaagctcaggccgatcaggctgctaatgaagccacagcaggaacgcaatccaatctggactgattccaacatcaattcatgcaatcgtaccgtcggcaatacgccgaccacatgagaaagaacaaatcaatgtcaacactgattcttgtattccatccccacctgcagaacggctcccgcgtcaatgcccgcttgattgccgagctgaaggctcaaggcgaagaagacatcaccatccgcgacgagtacgccgaataccccaatttcgccgtcaacgtcgatcacgagcacgaactgctcgaggcagccgatagtgtgattctgcaattcccgttctactggtattcctcccccgccctgctgaaggagtgggaggatcgggtcatcaccgcaggatgggcctatggtggcagctacgcactgcgcggcaaggaactcaaactggtggtcaccaccggttccggtgctgacaagtatcagaaagatggcgaatacggccgcactatggatgacctactgagcccatttgaagttgtggcatataaggtcggcatggaatacgtcaagccgttcctggtgcagggtacggccaccatcaccgatgacgcccttgaccaagccgccgccgactacgtttcggcgattctggactgaatggagctgaggccaggtgcgcgatacacctggccttattgtttttcacggatgagccgcagctctctccctcagtctcactgccgctcgacagctccctcttcagagggagcttgtttcctgtaaacttactggttacttcttgagcggcacgtagattacgctgtcgatgagctcctgatagtgcttgacgatttgcgcgcgacgagtcttcagactcggagtgagcataccgttggcttcggtgaactcatcgggcagaatctcgaacttacgaatcgattcggcacgcgagacaccttcgttagcggcattcaccgcacgctcaacttcggcatgaacaatggcgttcttggccaaggcatccaaatccggctccggcttggcaccttgggattccagccaattgttggcatccaccaaatccagcgtgaccaaggcagccacgaacggcttcttgtctccaataaccaagcactggttgaccaccggagaggtcatcacagaagcctccagaaggccaggcgacacgttcttgccgccagcggtgatgatgaggtccttcttacggccagtgatggaaatgaatccgtcttcggaaatatcacccaaatcaccggtatgcagccaaccatcagtgatctgctgggtagtgacctcagggttgttgtggtatcccttgcacaccagcggtcccttgactaccagctcgccatcctcggcgatgccggcggtgatgccgcacatcggcatgccgatggtgccgatgcgattgtcttccggcaagctcacgcacaccggaccacaggtttccgtcatgccgtagccttccagcaccggcatgccaatgccgttgaaaaagtgagagagctcggaatccatcggggctccaccggtgatggcaaagtcggcgttcgggccaaagatggtacgaatcttcttgtacaccacctgctcgtagaaagcgtgagcaacacgaccgggaagcggcagcttctcgcccttctgctcggccttggaccattcacgcgcgttttcggcggcgcgcatgaacatcttgcccgcaaaaccgctgccggcacgctgggaagcggcgttgtagaccttttcgtacacacgcggcacggcaagcagcagcgtgggaccaaaggtctcgaagtccttgaccatggtcttcatattggagctcagggccagagaaatggtgccgccaaaactgaagaattccatgaatcgggcgaacacatggctcaggggcaggaacagcagcagacggcggttgggccatgcgccggcacgaggcatgtactgcagggcggagcgcaccaggaacgcgaagttgcggtgggtgagctccacgcctttcggggtgccggtggagccggacgtgtaaacgatggtggcgcggtcgtcgccgtgggaggcgttcttgtattcccagaattcggcatcggtgacgctttcgccataggtcttgatggcgttcaggccgcctgcttcgatgacgaacacgttgcgcagggtgggtacctcgctgcgcacggattcaatcttgtcgcgctgaccgtcatcctcggcgatggcgagcgtgaccttggaatcgttgaaaatccagctgacctggctggcggagttggtctcatataccggcacggtgagtgcgccgatggacatgatcgccatatccagagcggtccactcccaacgcgtgcgagacacgatggccacggagtcgcccttgttgacgcccagaccaatcaggcctttggccagatcgatgaccatgtcacggaagaccagggcgctgtacggctgccaggtgccatcctcagttttatattcgatcatggcgccatcgggatcgcgctcggctcgctcatcgagcaaatcgaacaggttgatgtcgctgtcgatcggctccttgacgggattggtgaactgcttgacgatacgagtatcgttattggccttatcggcgatgttttcaggcatattcccatgtaactccacggaggatacaaaacacgccgattgacgctgcacgcccaatgcaaatggcctcgcacaccggcatccactggaatgcgaggccatgcggcaactcaatgtttacatgcccagtccagactcagccaatggagccgttgctctttttcagctcgtcgcgaatctcctgcaacgtggcgagcgtctgttcttcgacacttgggccttcttccttggcttcggcctcatcttgagcggcggtcaggtcacgcaacttgttgataggcagaatcacgcagaagtatacggccacaccgatgagcaggaagttaatcaaagcattcagaatagcgccgaacgaaatggtcgagttattgaacgtaatggtcagcagaccagacaaatccggcacgccaccgatcatgccgatcagcgggctgatgaggttatcgacaatggaagtgaccacggtggtaaccgcggagcctataaccacaccaacggccatatcaatcatcgaaccgcgggaaaggaactttttgaagccggcaagcgggcctttatcggtcaacgcaacgaccgcatgagtggcgctgcccgcacttttcataagattgtcggcaatattggatggggactgatttgccatgatatctccttaacagcgcaaatccgcgaaccgacccgatgacctgggctcgcctttcattcgccattatgcttcacgagaaaccgtatgcgcggttattcgacaacatatcggcagaaaaccagtattcatgcgcggatttacgcgggcaatcaccactgaccacccgcgttgcgactctcacgtttcagaactgaatatagtcgatctccgtatgttcgccggtctccagatactttgccacgtcatccggcccagcgaataccagctcgaccgcctgcgcaatcatcagattcacgcgatccatcggcgtcaggttttcgaaatagccgtataccggaataccaagcgcgtgagcatacccgacctcgaacatggtgccggggtcttcatccataagattggcaacaaccgcttgggatgcgttgatgccctgaatgtcatcgttgaagcagccctcggggccgacctcctcgatttggctggcgaatcgcggcttgaacagtgtcctgccgtgatcctccagcaccttctccaaccgttccatgctcgccgtctgttcgggattgaaaaacgggccggccacatagaagtcatactgcttgtcttcactcatggtttccagtcatagcgcagcatcgtccattcgcgggccacaagttcaatgcatggatagccgtccgcataatgaccatcaggagcgcaagtgcccgagatcggattcgaaccgacgacacccactttaggagagcggtgctctatccactgagctactcgggcaacgacgtttcattgtacacgggcagtcgcccagcccacaattcgtgccggtttggtacggaaccgcgctgccgccgccggcgcaatgtcgattcacaagtcgaacaaggtacagtggcaggtcatgggacaagctgcatcaccatgcatcgacgttcctcacaaagcaaatcaacgcaggaaaggcgatatggcacagtcacggaacaccaccagaggaaccacaaccaaagggaagtccgcacgccctcaaaccacccgttcgcagtccaagtccgcgcaacgaaacaaatcctattcccgtcctgtatcacagtcggcactcaaacctcatgagcgtcaccatttcttcggcacgctgacattgctgctggccatgactgcccttatctgcaccgccgcacgcgccttgccctcggatatccaaacctggccgttcatcccaatcgtagtgtcggcaacaccatggttcaccttgcttgccctgcttgcactgttgctggccatgccattgcgccgcccattggcggcattgattgccgttgccgccctcggactgaacgtctactggcagtacccgtttttcttcccgaccaactcactttcccaagacgcacagaacgccgtagccacggccgaagcgcacactgccgacgcctatgcccgcgtgatgaccttcaatgtctacaaggggcaggccgacgcccaatccatcgtcaatctggtacgcgatcagcgcgtggaagtgctcgcgctgcaggagaccacggatgatttcgtcaagcagctgaacgaagccggcattgaacattatctgccgtatgcgcacgtatcctcgtccgatggcgtgtatggcaacggcctctggtctgcggcaccacttaaggacgtggtcgacgacgaggtgaattccagcgcctcattcatgccctccggcacagtggacatgggaggcaaccagattcgtttcgtctccgtgcacaccaccgcacccgtgaccggatactggggacaatggaaacgttcgcttgatgaacttggcctgatgcgcagtcacacggacgcccgctatattttcatgggcgacttcaacgccacctacgatcacacgccattccgcgaatttctgggcaatcgattcgtcgacgcagcccaccagtccggacatggcttcacgttctcctggccaacaaaccgcagctatctgccaacgtttgccggcatcgatcatgtggtgctggacactggtatgacggccgggcaatgccaaatcgccaaaatcgcaggctccgatcacgcggcactactcgctacgatttcggtagggtaatacttgctcccgctggcgggagcagagaaagtgtcaaaaaccgagacgggtgcggccgaactggtcgagccaacgcaggatggcgccttcgcgcaacgcccacgggcagatttcgacttcctgaatgttcagggccttcatgatctcgtcagcaaccacgccgccgcccacaatctgcattgtgcgctcaggcgtgataccgggcaacgccacgcgctgttcgggagcaatcgccgccaggcgaggaatccaatcctccagctgctcgcgggtcatgatccacgtatcttcacgcccaggcgcacgcatcaccgcgccgcacaagcgagccagcgaacggaaggtcttggacgtgccaacggcatggttcggatgtttggattgcgggaacaccttgaccatcggcgccagaatcttacgcacatctttgcgcacgccctccagctcctcgggagtagccataccggaaggcaggaactcggtggtcacacggccggcacctgccggcacggaaagcgccacagtcggctcttcatcggagcccatcgccacttcgagcgagccgccgccaatatccagcaccagcagtcgaccggcatcccaaccataccagcggcgtgcggccaggaacgtcagacgcgcctcatcattgcctgacagcacggtcacgccctgaccgactatctcttcaatcttatgaatcaccttgttgccgttcggcgcctcgcgcaaagcggacgtggccatgaccagcaactgagtgatctcatattcttcagccagtttcatgcactgggcaacggcggccagaatcgcctcgatgccggacttcttgattgagccgtcatccttgagatacttcatcaggcgcaccgttgatttggtactggcctcgggatcgggacgcgcgcccggagctgcatcgacaatcaacatatggatggtatttgaaccgatatcaagcacaccgagtcgcgtggtatgagaacgcagattgaccatgattcctgaccttacctaacacaaacgcgactactgtacacatccacgcccattacagcgattcgacgaacctgtcgagtcgctccaaaccttcggacaacgcctcgcgagaagcggcatagctcagccgaacatgcgtatcggcggtggcggcgccaaaatcacggccgggagtcaacgccacgtgagcctcgtccagcgcacgctcgcagaacgtccatgcatccaatccggtacgggaaatgttgaagtaggcatagaacgcgccgttcggctccacttcgaccggcagtccgatgcgcttcaaaccatcaattacgatgcgccgacggctcagcagctcctgacggcgggcttcacactcagccaggctctccggcgtgaaacaggcgagcgccgcatgctgggtgggcgtatgcgcacacaggtaataattggtggccagatcatcgaccgcctccagcacggtggaatcatccggcagaatggcccagccaagacgccaaccggtcatgccgaagaacttggagaaactgttgcacacgatggcgccagggtcacaagccagcaccgatttgacctcagtgccgtccggctcatgatcggccagatcaagataggtctcgtccacgatgcgccatgcgccacgcttggcggccaactggcatacttcatccagcacggcgaagtcgatggtggtgccggtgggattggacggcgaggtgatcatcacggccttggtgtcgtccgtccaatattggcggcataggtcggcggtcagatggaaccgcgtggcggccgatgtcggcacatcgacaacccggccttcaaaggaacgcaccagctcgcggttgcacgggtaggagggatcggccacgatcacgtcatcaccgggatccacggtcagggctgtggccaacagcaaagcggcggacccaccggcagtcacgcagatgcgtttgggatcgatatccaaatcatggcgttctcgatagaaatcggcgatggcttggcgcagttcgggcaatcccatggctgcggtgtagggcaaggcacggccatcgtattgttcgcgcatggcatcgcgtacggcaggcggcgcaccgaaatcaggctcccccagactgagcttgatgacactgacaccggatgcaatcatcttgtccgctttctcgccaaataccatggcgcggaagggattggcctcgcgcgcgcgacgagacataaccggggacacgggctgctgcactgcttcgttttccatagttcggttctatccgctctcggggacaaggtttttccgtggctttataatcgctggggagaccggttaccacctcaacccaagttcaaggaggaatgatgagccgattcaacggcaaacgcgccgaattcgaggccagcggcgagaaaatcaacgttgctattctgggcgcaggacgtatagctcacaccatggccaataccttggtcgaaatggccaccgacccgctgtattcctcatggattcacccgtatgccgtggctgcccgtgatctggatcgtgcacaggcattcgccaatcaatggcatctcgacaaagcgtatggttcgtatgaggatctggtggctgacccggatgttgatttggtctatatcgccactcctcataatctgcatgccgagcaggcgattttgtgtatgaaggccggcaagaacgtgctcgtggagaagtcgttcaccgcgaataccgcacaggcgcgcgaggctttggccgtatccaaggaaacaggactgctgtgcacggaagcgatttggacgcgttacatgccaagtcgtcaactcatcaatgaggtcattgcctccggagaaatcggcgaggtgaaatccgcaagcgccaacctgtgttatccagtgtccggcaaggcccgcatgatcgatccggcctgcgcgggcggcgcgctgctcgatgtaggtgtgtatccgctgaacttcttggatatggcggtgggtgctgatcacggccgcacattggatcatttcagcacctcgatggtgccgtatgaaaccggcgtggacgcacagaattccaccacgctgtattacagcgacggcacgatggcggtatccaccagctcgatgctggtggcctccgatcgcggcggatatgtgtggggcaccgagggatatctggaagttaccaatatcaacaatcccgagtccatcgatatctacggcaaggaccacaagcccgtgcgcagcatctcggttccgccgcaattgaccggctacgagtatgaggttgccgccgcggccaatgccctattggacgacaagaccgaatgcgaagcgatgcctcatgccgacaccattcgcattatggagcttatggatgcgattcgtggcagttggggcctcaagttcccgtttgagcagtagttgtcctcccgctggagggagatggcacgcagcgtcggagggtggtcctgcagaccaatcgatgtcgacctcccctcagtcacctgcggcgacagctcccctccagcgggaagccagaaggacacacaatctgttcgtatagccgtgcgagacgcccgtctcgcacggcttttgtcaattcgcactcccacacggtgatcacacgccagccggaggcctctaattcggcgcgctgggcgatgtctcgattgtggttgcgcaacagtttcgcctgccagaattccacattcgacttcggcatcgaacgtttggaacagccttcatgcatatgccagaaacagccgttgacgaacacgatggtgtggtatttcggcagtaccacgtccggatggcccgggtagcgcttgtcgttcttgcggaatctcaggcccctgcggaacagatagctgcgtaccagcacctcgattttggtgtctttgccgcgaatatgcgacatcgtgtacgagcgggtgccccgttcatacttttccactggctgcttcttacgactcacgcactccagactaccgtgtcatatcggtacgagacgatatccgatcgaacgatcacccattgcatgcggtcgtcatctcttattccggtcattcctcgcacgctggtcgagaccgcgcacttacacttcacctatggcagacatgacgattcgcagggccacggcggccgatattccccagattgatgaactgttgcggcaagtgctcgaagtacatcacgccggccgaccggatctgttcaaaggcggcgccaaaaagtacacggatgaagaactgaaaacgattctggccgacgatcaaacccctgtgttcgtggcagtggcaccagccgacaccgccaatgccggcgatgccgaatcagtcagcgccgcacactcagctgaagaatccagcaacaccggctccctcgccgtcgatcaagtgctcggctacgcattctgcgtattccagcaacacaccaacagtaatattctgaccaatatcaagactctgtacatcgacgatctatgcgttgacgagcgctctcgtggtcatcatgtgggctccacgctgtatcattacgtgctcgatttcgcccgcaaattcggctgctacaacgtgaccctcaatgtttgggcctgcaatcccaaggcccagaccttctatgagcgtatgggactgaccccctaccgcatcgacatggagcagatactgtaacccactcatcccaacagatcgagaaggtcgtccctggtgagggtggcgatagaggcaggggcttcggcaaagacagtggtgccggtgccggtttcgtcggcgagcggggaggcatcggtgaactggcgggcaagttcgctcttggtgtgctgaagctccaagatgcgttcttcaatggtgtccttggccaccacctggtacacgttgacgtcttcggtctggccgatgcgatgggctcgatcggcggcctgatcctgggcggcggcgttccaccatgggtcggcgtggatgaccacgctggcgccggtgaggttcagaccagtgttgccagccttcaatgaaatcaggaaagcgggcgtatcgtccgcgttgaactggtcgacgagttcgaggcgcttccttttgggcgtggaaccggtgatggtgtagtagcgcaggccttgcgcgtcgaaacgttcggcgatcagatcaaggaaactggtgaactgggagaagatcagcgccttcttgccttcgttcacgcaggtctccaccagctcggcgatggccgcgagtttggccgactggtctttggcatcggcgtacagcaaccttggatcgcagcagatctggcgcagtctggtcagctcggcgaggatacgaatcttcgaggtgttgaactccgcctcctcgctgtgttcgagctgcatgcgcaggcgctgctcgtgagccgcatacagcttgcgctgttcgccggcaagttgcacggtcagcgtggtttccagcttgtccggtaggtcggtcagcacttgggacttcagcctgcgcttaatgaacacgcccaccagcgactgcaattggtgggacacccgtgccgcctcgggattgacctgagcagcggcacggccttcttcggtactggaatccacggctctcgcgttggagatgggcagttcataccgttcatggaaccgcttgtacgtgccgagcaagccgggcatgaggaaatcgaaaatgctccacaattcggaaagtcggttctcgattggcgtgccggtcaaagcaaaacgatggtccgccgctacggccttagccgctttggcaattttggtggtgtggtttttgatgtattgagcctcatccagagccatgacgttgaaacgccgctcatctgcggtgtagtcgtctacatcccggcgcagcaaatcgtatgaggtgatgagcacagtgggctcatccgcacggaacgcacggcctatggcagtgcgacgctcggatttggtgccggcaacgaccatggcattacagctgggggcaaatttggcaaactcggcagcccagttgtataccaacgatgccgggcagacaataagcgaaggttccacaatcgcgccatccgcagtgccatccgcactacccggcttccgatagcgagacaacaacagggcgatgagctgtacggatttgcccagtcccatttcgtcggcaagaataccaccgaatcctttgtcgcacaaggtgttcagccaccggaagccctcgacctgatatgggcggagaacgggcttgaggctgtccggcacctcgtatgatttggggtcgatgattttgaggtcgtcaatgtattcggtgaaagatgcatccttgaccacatcggaaccgtcatccggcagttcaccgtccagcagaaatgctctgccgcccggcaattcaatcagcccggaattgagctgctgctcgtccaaatcaagatcggcagccagcgtatcaagcgtattcaggtttgcgccctcaagtttgagcagcgtaccgtccttcaactggtgatagcgctgacgacgccgataggatacgagcaaggcaccgacctcgtcaggcggcacttcatcggcaatgggcgagatctccaccagattgcccttaatggacaaaccgactttgacgctcggcggcttgggtgcgatgagccggtcgaacgcaggcgtggtgaacacctctcccacctcatgcaacgccggcagaccttcatcgaacaagcggataatctgtgtggtgtcatcacggttgatgacggcggcctcggacgcacgcgcgcgggccttggcgcgggatgccggggtcctgaatccggcagtcgcctgtctggtttcggccaacttgcgccgctgctcctcaggcatggagaagaactcacttaccacgtcaagagccagatgttcggtatcaaggtcacggccaggcaccgcgaccggcatgccgccatcgtcggcgctcacagcgggcccagccggcagcagcggcaccattacattcccatagcgggccttggcctcgcattccacgccgttttccgtacgatccagatagaacccaacatggcactcggcaggactcagctcagcaagttcacgcgggatatcatcggcggcaagcatgtctacattcaccagttgcggcaataacgtgcgggcgaacagagccgaatcgtctccggcgatgacctgcccctcaccgtctggcgcaaacagctcaccgataagttccgcaatcggaccgaattgcttcgggcaacggacgaaccggtatcctgcggcacttttgcgccgcgactttgccatcatggcggaggtgtaagccaaaggctcggacggtgcgagcaacagccaagattcacggtcgccattgatgacggtctccaccgaaggcgttccagtcagcaaatacccggcttccgacccgaacatacgggaatcgcgtctgacgatatgcatggtcaggtttggttccccgccaaccgataccggcgaaggctggctggaaaaccaggtgtccagcaccagttgcacgcctacgctttcacgcaaaatcaatagcgaagccacttccgtctcggatagtgtcaggtgacggtcaatggcaatacgcccgtaataccgatcctgctgttcggccgcgtgacgtatggcgagcgcggatttcaggaatctcagcaatgggcgggaatccgcatcaagcatatccggcgtatgcgtgaacgccagtttctgcccgtaatcctcatgatcgccgttggtcatggcccgcacgaattgtgggatggatttcagcacatagctggaggagtttatggctgagccaatcttgaattccacactccaggtaccatcgatgaagctcaggatgggtgtaagcctgacctggccaaccgagacggtttcacgcaaaccctgatatccgcccattccggaaccatacccggtccgattgcggtggctggagacaccgcgcccagccgtaccgccgccatcaaaccgttgcatgacggcgctgcgtcgacgagccctgacctgcgcatcctgcttatccgcgcgttccatgtagtcaagcaacgcgcgcgaaggccgcacggcaccggcatggtatcccttgaatcgttgtggctcatcgcagaacatcaaagcgagagccgccatatgcttgcaaatgccatacccgcgtccataagccgggcaggtgcaatcaccgccagccacttccccggtgtcaaggtcgaactgcagattgacacgataccggctggagggactggtggtgccgcgcatcatggcgccgagttcggcatatccggtacgccgattctcgtcataggtggggtcgatgagcatactggccgctttgcgcgcgatgacgcgggcacgggccaatacggcgttcgaggtggaggtttccacgtcacggcgtaatgccgcaataggcgcctgccggacaccttgctcattcaggccgttaatctcatcctcgtcatcgaaccacacggagcgacccggccgacgtgactggctataaggaacaaccgcatcctccgcactgagtgatccagccgagccgaatgccacatcatcattgccatcatcatcaacaccaacgaaatcgccgtcatcgggcaacatggattcgtcaccatccgcattcgcgctcttccacggattgcgacgcctcagcccattgccccaagccgcattgtcatcttcgtaatcggagtcgccgccgccatgggaggcatcgtcaggaacatgcccgaatacgccgtatccgttattcatggacccctcccccgattatatgtttcaggccaacatttccatcttagtcgagtgtctcgcgagccattacgcggaaccaagctctcggctaaccagacatgacgctaaggtggtaaccagcaaaacgctgcgcatcgttcaacgatgtggagcagcaagcgataaaggagcatatctatgagcgaagcgcgtaccgcatggggctggggtctggccagcgtcgatgctgccggcaccaccttggacgtctggtaccccgaattgactctcggcgaggcacccgccgagtccgaccgaccaaaccacaacttcggcacattggcccacacggaggccgacgcccgcggcatccgtcgcgtgccggtgttcgccgtcagccagctggatgagccaatcgtcaacgcagccgacgcctacctgaagcttcacctgatgagcatgcgcatggccaagccgaacaccctgaatctcgatggcatcttcgcccagctcgccaatgtggtgtggaccaattacggcccgttcgccgtggaggatttcacgttgcgcaaggccgacgtggaacgtgccgccaccgatgcggctctcgcttttgccactcaggcgggcctgtcggccgcagctcctgccaccactgtcaacgtgttcggtgtggataagttcccgcgcatgattgactacgtggtgcccaccggcgtgcgtatcggcgatgccgaccgcgtgcgtctcggtgcctatctgtctgccggcaccaccgtgatgcatgccggattcgtgaacttcaacgccggcacgttcggcgtctccatggtcgaaggccgcgtctcacagggtgtggttgtgggcgacggctccgacatcggcggtggcgcctccattatgggcaccctctccggcggcggtaagctgcgcaactccatcggcgagcacagcctgctcggcgccaacgccggcatcggcatctctttgggcgacaattgcacggttgaggccggcctatacgtcaccgccggcaccaagatcaccatctgggataaggccaaggccgcggccggcgaaccgctggaggtcgtcaagggttcggacctctccggcaaggacaatatcctgttcatccgcaactcggtgaacggccgtatcgaagcccgataccgcaaggtgggcatcgagctcaacgaaaagctgcataagaactaagcagtcagcccatattgggcgcctagcggttatgtaaacgcctcatttggtattccagtgaggcgttttctcttactacccgagggtttgccccgctgacatgttctcagcggggcaaacccaccagcaaccctgggttttgcaccgataagacgatatcagcgaagcaaaaccgcgactaagtcaacaaaccaccccgctaaagccctctcagtgcggcatagtcacaacaaactcgagggtttgcctcgctaacacaatctcagcggggcaaaccctcgggtgaatcattatttcttacgcaaattatcatgtagcgagcaatcagctcccacatatcgaacaaaccggcatcaccggaccacgcaaagcatttagcgctcgtccatgggcacgtagtcgcgctcgaccgggccagtgtagacctgacgcggacggccgatcttggtgttcgggtcggccagcatctcacggtactgggcaatccagccaggaatacgacccaacgcgaacaacgtggtgaacatggccggatcgaagccaattgcccggtaaatcagacccgtatagaaatcgacattggggtacagattgcgcgacacgaagtattcgtcattcagcgcaatgtcctcaagctccgtggccacggcaaataacgcccgctcatcggaaggcagcttctgcgtatcctctcgttccatgatcttttccagatacttcttggcaatcgcggcgcgcggatcatacgacttgtatacgcggtggcccaggccggaaatcttctgacccttggccttggcatcctccacgaattcgcgcacggatttgccggagtcgcggattgccttcagctggcgtagcacggcctcgttcgcgccaccatgcagcgggccggacagcgcattgacaccggcggccaccgccgaatacaggttggcatgagccgagccagcaatacgcaccaccgaagtcgagcagttttgctcatggtcggcgtggataatcagtaagcgacccaacgcatgtacatacaacgggtcggactcgaatggctcatacggcacggcaaagcacatacgcaggaagtcgtccacatagccacgcgcataatccgggtacaacatcggctcatcacggcgacggcggaaaatatacgatacgatcgtgcgagccttggccatgatgatcttggccgactcatcaagctgatcggtgtcggcgatgtcagtcgtatccgggtagaacgtggccagcgcgttgattgcggaggcaagcacactcatcggatgcgcggcacgcgggaacgagcccatgaacgtgcggaaatcctcgccaaccatggtcttatggttgatgtcggcgcagaactgctcgtactcggccttgcttggcaattcgccatgacgcagtagccaggcgacctcaagaaaatcggagttctcacacagctgctcgatcgggtagccgcggtagcgcaaaatcgaatgcttgccgtcgatatacgtaatcttcgactcgcattgggcagtggtcaggaatccggggtcaagcgtcacccagccgtcattgcgcagcttggaaacgacaatgccatccggtcccgcactcgccttcaccacaggcaggttgaacttgctcgaatcgacatcaagctgtgccgtcgccatgcgcgcgccttcctctttatgaaccgcttgttcgaacaccaacatttatgaacattggtgttcggtactgtatgtcttttgtgttaccgccaacgaatgccggtcgatacacgaaagccgaagtgcgctcatgctatcaaagcaaatgcacttcggcttgttacgtctcgaaatcgcggaaaaaccgcgaacattcaagcgcttgcgtcaatcagaggcttgagcgatcggtgaagatgatcggaccgttctcggtgatggcgatggtgtgctcggagtgagcaccgcgcgaaccgtcggaggcgcgcagggtccaaccatccttcggatcctggaagatctcgtcggtggtcttgaggaaccacggttcgatggcgatgaccaggccttcacgcagcttgtagccatggtgggcgcggccatcgttcggcacatgcggatcgccgtgcatgatgtgacccacgccgtggccgccgaactcaaggttgatcggatagccgtattcgcgcgcgatatcgccgatggtattggagatatcaccgagacggttgccgggcttggccacgtcgatggcggcggcgagcgcttcttcagtgcacttgatgattcgcaggtcttcggggtcgggatcgttgccgaccacgaaactgacggcggaatcggccacccagccgtccacggagatggcgaggtcgagggagacgaggtcgccgtccttcaggctgtagtcatatggcacgccgtgcagcacagcgtcattgacggaggtgcagatgtagtgggcgaacgggccagtaccgaagtcgggagcgtagtcaacatagcaggattcggcacccttgcggtccacgatcttcttgtggacgaactcgtcgatttcgagcaggttggtgccgaccttggtgttctctttcagttccttcagaatgccgccgacaaaacgaccagcaggcttcatttcctcgatttcacgaggggttttcagttcgatcatgaggctctttctaccttgttgagacttgttctcaactctagtccagcccgaggtcaactgccagcgcccggcaccgccaagcgacggcagcgggtgcggccaagaaaaagcgcccgggcaagtatggaacccgcacggacgctttggcttgatgacttggtgtctactttctgggcttgccgaaagtgaaagcgcggataaccgcggtgatacccatgacgaccatggcgcaccctccaaacaccaccatgaagaccgcagagctcagcggactcatcagcacgataaagccggcaacaatcgagataatcgcataggcgatggcccatcccgaatgagggatacgccacgattccaccagcgacatcacaccttccatgatccagccgaagccgaccatcatggtgatgagcagcgccagcgtctgcccggtcataccgtagtttctgacaaccaccacgccgccgaaagtcagcaagataccgacgaacacatccagcacacgccaaccggccggcaggaacggctccaccaaagcacccacgatgcgcaccacaccggagatgacgaagtagacaccaagcagcagagccgccagagccaaggtcttgttcggcacgagcaaaagggccgcgccaagggcgatggcagcaacgccaactacgccgtagatcacacgaatcctggtcttggccttttctggcaaccattcctcaataagacggaacgggttgaaatcgccggtataccaattggtctgctgccagccggactggttgccgccatccgcttgaccgttgttttgatattgctggccatccgggccccatgccggctgaccgttcggaccataattcgggttataggcatatgggccgtacgggttctggttcgccccgccctgccggtcattctgcccttgcgcaccttgcggcggatattggccgccatgattgctgtcgtacgcaccgtattgtggatagccctgctggttcggctgattctggttcggctggccattccactggccgtcattcggatcgcccatcatgactccttccatcatggtcacattcaagcttcatctaccacactagacaggttatccaattcagaccatcatcaaaactaggcaatatgtctatttcacttacggcgcaacgttgcgacgaccgaggaacgcttctcccccgccgcgattaggcttgaggccatgaccaacgaaaccgaaacgctgacgtcgggcattgacccggcatcgttctcctccgtcatcaaaccgaccaacgacctgttccgctacgtcaacggcccatggatcgacacctaccgtctgcccgacgatcgttcgcgctacggctccttcgacaagctcgcggaggattccgaaaaccaggtgcacgagattctcgaagacgatgactgcccggcaaccaaatcacaggccttgtatcgctcgttcctcaatacggatgccatcgaagccgccggcctcgacccgatccgcgatgaacttgaccttatcgattcctccatcgacaaggccgccctcacgcgcgtgctcggcaccatcaacccaaccggaggccccgacctgttcggtctggccgtatacggcgaccccggcgacccggaccgcaacatcgcccacctcgagcaggccggtctgtgtctgccggacgaagcctactaccgcgaagaccactacgctcctgtacgcgaagcgtatgtgaacatggtcgccacgcagcttgtcaatgccggctatgctccagcagctgaagacaaccccaacgtggatgacgaactgccaaagccgcaggacgaggatgaaggcaatgagccgaccaccgcaacccccagtgaggccgcccttgatatggctcgccacttccttgccgtggaaactaagatcgccgccaaccattgggacaatgtggccacgcgcgactcggtgaagacctataaccccaccgattacaacgacctggccgccacactgaagaacttcgatctcgattcctggattaacgcctggcagtccgcctatgatgccaccgagtccgccaaggtccagccgattgacttcaagtccgtgttcgcacacgtcatcgtgcatgagccaagcttcctcatcggtcttgatgcgttctgggccgaggccaatctggccgatctcaagctgtgggcccgtgtccacatgatcctaggcttcgcttcctcgctgtcccacgacttcgacaccacaaacttcgacttctacggcaaggtactttccggcgccaagaagcagcgcgaccgctggaagcgcgcagtcagcctggtcaacggcatctgcggcgaagacgtgggccgcgagtacgtgcgtcgtcacttccccgaaagctcgaagcgccgcatggaggaactagtcgccaatctgattgacgcctaccgcgcatccatcaccaattccgattggctgggcgaagacaccaaggccaaggcactggagaagctctccaaattcacgccgaaaatcggctacaccaaccattggcgcgactactcggcattgaatccatccgcagacgcgctgcccgccgagaacgccaaggccgcaaacctctatgagaccggctaccagctggccaaggtcggcaagccggccgacaaagacgagtggctgatgaacccgcagacggtgaacgcctactacgagccgagcatgaatgtcatcgtgttcccggcggcgattctgcagcctccgttcttcgacccgaaggccgaagatgcagccaactatggtggcatcggcgcggtgatcggccacgaaatcggccacggttttgacgaccagggttcgcagtacgacggcgacggcaagctcaacaactggtggaccgatgaggatcgcaagaacttcgaggcccgcaccggtgcgctgatcgcccagtacaacggttttgtgccgcagcagctggccgagaaatacgccgacgaaccggacaaggcaccgcatgtcaacggcgcgctgaccatcggcgagaatatcggcgacttgggcggcgtgaacatcgcactgaaggcgtatgcgttcgcactcggcaaggcggcaggtaaagcggatgtcgaggaagacggttcccccgccgccatcaaggcgctgctcgataccgcccccgagatggacggcttcaccggcctgcagcgtttcttcctgagctacgcctccatctggcgtaccaagaaccgtgacgaactggccgagcagtacttgcagatcgacccgcattcgccggccgaattccgcaccaacggcatcgccagcaatgtggatctcttctatgatgcgttcaacgtcactgagggcgacgccatgtggctggaccctgacgcccgcgtgcgtatctggtaattcctccaccaatcaatatcggcctgtaatccttcgcaagggtgcaggccgatatcgttttggccgcatctagaactcgtccgtttccccctctgtagcattcgcagcaccaccggcaaaagctttctggcttgcggattgtgattgacctgtatcggcattcggcgccgaaacttcaccgtcggcatgttcttggtctcgcgctgcattgaattgatcaccttgatcgttctcggtgatgccgaattccactggcttcgttccggctgcattggcataggggtcggcgcccggcccggacccagcatcataggactgccgattctgcagattttgccgggatgcctcatcagtacccgcattggcattggtgccattgcgctgcgccttggcaagagaagtggtgccaaaagtgagatcatggccgatattggtggcttccacaacggttttgctacgggcctcgccctgctcggtagtccactggtccgtgttgagcactccgaccaccacaatgcgatcgccacgtcgaaccgattgtttggtattttttgccaacgcgcgaaatgccttgaccgtaatccaggcggtggcaaaatcctcccactgctgtgtgctctgattaaacctgctacgggtgctgcccattcggaaggtcagcacgggaaaagtgtccgttccgcctagcacgggatcgcccgccacaaatccggtaatagttactgctgcctgttgaatcgccatgatcggccctttctcacgtcactgttgtggaccgccggggcctgtctatggcgtcatcaccaatgcacaccccaacggtatctccactgtgaagtgccgcaccgtagcagcacaagggcaaccgacaattgtggataccgtgacggggttgcattttttgtactgtggataattttggactatccacaattaggagcaaaaaagcaaaagcgccaccctgcaaagagcaggatggcgctgtaattatgggctatcagccaccctcagccgagagcagcaaaacgatcggccaaggtaccggcagcttcagcagcgggcacggcgaccttgttctcgccattgcgatcacggatctcaatggtgccatcgttcacgtaatcgcgaccgaccacggcgaccagcggcacgccgatcagctcggcatccttgaacttgacgcccggagagaccttcttacggtcatcgtaaatcacttcaaggcccttggcctcaagttcggcgaccagtttctcggcaccttcgaatgccttttcatccttgccggtggccaccacatgaacggcggccggagcgatcacggacggccaggccaagccggcctcatcgtgatgcgtttcggcgatgcaggccagcacgcgggagacgccgatgccatagcagcccatccacaccggcacggccttgccgttctggtcgagcaccttcaggtccaatgccttggaatacttgagacccagctggaagacctgaccgatttccacaccgcgctcaaagctcagcgggccggaaccatccgggctcatatcgccgtggcgaacctcaacggcctcgaccacgccatcggccttgaaatcacggccatagaccaggttgtagtagtcaacctcgttctcatcagcaccggtgaaccaagcggagcccttgaccacgtgcgcgtccaccaagtaacgcaccgggttcttcacgccagcggcttcggcctgcggaccaagcaccatcgggccgatgtagccgggcaccagttcggggtggttctccagatcttcttcattggcctcttcaagctcagcgggggcgaactgggcttccagtcgcttcatatccacagtgcggtcgccaggcacaccgacgacgatcacttcgcgccacggctcgtcatgctcctcatcctcagggtgcttgacggtaatcaccacgttcttgaggatgtcggaagcctgccattcgcggccatcggtacgcgggtggtcggcgttggcacgctcgatcatgttgtcgatagtcttggcatccggggtggcttccttggaagcggcaggagtgttggaagcatcgacttcaggcagctccggagtggtcaaagcctcgacgttccaagccttgccggaaggagccagagcgaaggtgtcttcaccgatcggcattggggcaaggaactcctcagaagcagagccgcccatcggaccggacatggcgaacaccggcacgtacttcaagtcaagacgctggaagatgcgctcgtaggcaccgcgctcgtcgtagtaggccttgcgcatgccttcctcgtcgatggtgaaggagtaggcatccttcatgatgaattcgcggccgcgaatcagaccggcgcgcgggcggaactcgtcgcggtacttggtctggatctggtacagggtgacgggcaggtctttgtaagaggagtacatgtccttgaccagaagggtgaacatctcctcgtgggtgggggccagcaggtaatcggcctcgtggcgatccttcaaacggaagatgttatcaccgtactcctcccagcggtgggtggcctcgtagggctcgcgcggcagcagagccgggaagtgcacttcctgagcaccgatgccgttgatctcctcacgaataatatcttcgatcttgttaagcaccttgagaccaagcggcagccaggtccagatgccgggcgcggccttgcggatgtagccggcacgctgtagcagtttggccgaatcgacatcggcatcggcggggtcctcgcgcagggtgcgcaggaacatggttgacatgcgaagggtattggaagtcataggttccaagatattcgcgtgaaccgacaagctaagtcgtcacaggttccgtttccggccttaatcttggcatacggacggttctctatggcagaacgactcgaggcaaggccatggcctggctgaagagacgtttcatcaccatcgcccggcgattgcggtgccacattgcgggcagtgaccgttgccgccggagcttgctgataggcggtcggcgataatgcggtaccagtcgcgctcgatgagcttcgcatggcactgcgggttcggacaatacgtagtatcgccctcgcggtcatgcacattgccggcgtagacataatggagcccttcagcgagcgcgatggcgcgggcacgggtcagcgtctcgtgcggcgtaggcggcacatccattatccggtagctcggatggaatgcggagaagtgcagcggcacgtccggccccagatgtttgcctatccacgtgcattcggcgtgcagctgggcatcgtcatcgttgagaccggggatgagcagtgtggtgagttccacccacacgtgttcgccttctggggtacgtgcctcgttgaccgcatagtcgatggtcgcgagcacgtcggccaaatgcgtgccggtcactttccaatagaaatcttcggtgaagcctttgaggtcgatattggcggcgtccatggcggcatagaagtcgggccgggcttcggcactcatgtatccggccgtcacggcgatgggatggatgccgagtgcgcggcaggcttgggcggtgtcgatggcgtattcggcgaacacgatggggtcgttgtaggtgaatgccactgagtcgatgccacggctggccacgacctgcgcgattttctccgggctggcccccacactgagcttatcgatgatgcgcgctttggcaatgtcaaaattctggcagaagcggcagccggaattgcagccggccgtgccaaaactcagcacactggaaccagggtggaagtggttgaggggcttcttttccatcgcgggtcttgatggtaattgcctttggctcccccagcaccgacacctcgatattcagcagtgggtattccgcagcggtgaccgggttgaaacgtgggtcacgggtggcggcatccaccgcatgggcgatcacatccttgccaagtggttgatgggcaaccagcgagccaatgcagccgcgcaccaacgtcattccgccgtctttaagtgttgtctacttgggcatcagcccctcgaaatggagatagatgtcctgaaaactcaaaatccgccccttgaaacgcagaaacgcttacattagtagtcgttcggcatagcaaccgtcagaacaaggcgtcttgggcgaattcgtcattgggatcggcggcgaattcgtctggctcggtgggtttgaatgcgcctgcgccttcatcggccaactggtcggaggccgaggccgaggcctcgcgcaggtcgccgtcaagcaccacggcatcgggtgagacaaggaacatgcgctcgttgacaccagccaaatacagtccgcccaatgattcaactcgggagagcgccacatatcccatgcccggcgcgaaggtcctcttcaagtccataaccgcgcaatcgagcgtcataccctgtgacttgtggatggtgatgccccacgcgcagcgcaacggcacctgagccacggaagcgagcaccgtctcgccatccatcatctcccacttggcctgtttcatggtgacgatattgccgttctcgaattccacaatcggccaaccgcctttgttctcctgcgcaaaaccgcgaacggtgccgagcgaaccattgacatactggcggtcggggtcattgcgcagagccatgacggccgcgccttccttgagcacgagccgctcgggggcgagcatgttcttcttaagccgatcgaccagattggccggtcctgcggtttcggcatggaactcatgaggctcgagcatgatctggttcagccgcatgtcgttgagattgtcggcctgacggttcacggggaagagatggacggccacttggccgggctcgggcagcttgcccaaacgcgtgacgagtgcgtcacggtcggactgggtcacgtcgccttcgcgaatgtcagtaagcacggtcagaagctcaccggtgtcttgacgatgctgctcggtgaggtagcagatcaccgggttgagttcctgccacaccagcgattcggtgataaagccttccggattaagaccggcacgggcataccgttcacggctggcgatgaattccggtgtgggttcgatgaggtcgcggttgcggccggataccgagaccggaggcagctgaaacaaatctccggacagcacgacctggatgccgccgaacggccgtgggtcgcgacggacctcgcggcagacttggtcaaccatgtcaaacagccaggcgtgcagcatggagacctcgtcaatgacgagaatatccgtggcctgaatcttgcgtttgcggcgggatttgatgagcttgagcagactggaggtcagacttgtcgccacacccacaccactccatgagtgaatggtctggccattgatatgcgtggaggctatgcctgtggacgcagtgacggccacgctcgccccgtcggcacgcgcctgccggatgaactcgttgagcacgtaggtcttaccggcaccgggcgcaccggtcaggaacacgttcgcgccggcgttcagaatggccagggcttcggtttggcgcatatcaacctctctaggctccactctttgagcggagctgactgaggggagtcatacgcatccgtgactcccctcagtctcacttcgttcgacagctcccctcagagaggggagccaagtacggcggactacttattgaggatgctggtggagacgatgtcggcagagatagccttggctgcggcctcgtccgggccgggggccggagccatgaaggccttgcggtagtagcgcagctcatccaaagattcgatgatgtcggcgagagcacggtgaccgccattcttcggcgggcggttctcgtagacggccgggtaccagcggcgggcgagctccttcagagtgctcacgtccacgctgcggtagtgcaagtgactcatgaggtccggcatatagtggtcgagaaacttcttgtcggatccaatggtgttgccggccagcagcgggcgcacgccttccggtgtgaagcgcagcacgtattcggtgaccttctgctcggcctcggccaggctcaggccattctcccactcgttgatcaggccggaacgggtgtgcatctggcgcacgaaatcgttcatgtggttcacggccttctcggacggcttgatgacgtaatccacgccctcgtccagcacattcaggtcaaagtcggtgggaaccacggacacctcaacgagttcgtcgccgccgaagatgtcaagtccggtcatctcgcaatcgatccaaatcaggcgcgagtccttcgcgctgtacgtttccgcgtcatggctgtcgaccatggtgtgcctcttttcttcgctggtcatcgcttatgcagaacagttcagactataccccagcgcatacaagctatctcgagccacatacgcgaaaaagggcctgcataagcagacccttttcacaaggaatcaacccctaactagcgcaagctagcgggcatcaaccgatcagttgttgtggaagccggagtagttcggtgcttctgcggtcatcacgatgtcgtgcgggtgcgattcacgcaggccggcgtcggtgatacggatgaacttgccacgttccggcatttcggcgatgttgtgtgcgccaatgtagaacatggactggtgcaggccaccgagcatctggtagagcacagcgttgagcgggccgcggtacggcacttcgccttccacaccttccggcacgaccttgtcgctggaggtcacgtcggcctggaagtagcggtccttggagtaggacttcttgccgcgcggagccatggcaccgagggatcccatgccgcggtacagcttgtactgcttgccgtgcaggagcaccttctcgcccggggcttcctcacagccagcgagcgtgccgccgagcatcacggaggaggcgccagccacaagggccttggcgatgtcaccggagtagtggatgccaccgtcggcgatgcagggcacgccagcggcacggcaggcctgagcggcctcgtacacggcggtgagctgcggaacgccaacaccggcaacgatacgggtggtgcagatggagccaggaccaataccgaccttgacggcatcggcaccggcctcgatcatggcctgggcaccggaacgggtgccgacgttgccgccgatgatctgcacgccatcgaaggcggaatcgtgcttcaggcgggagatcatgtcgagtgccaggcgggcctcaccgttggcggtgtcgaccacgagcacatccacgccggcctccatcagggcggaggcacgctgccatgcgtcgccgaggaagccgacgccggcggccacgcgcagacgaccctgctcatccttggtggcgtccgggtactgttcagtcttgacgaagtccttgaccgtgatcagaccagtcagatgaccttccgcatcaaccagcggcagcttctcaaccttgtgctgggcgagcaggcggtgggcgtcgtccttggagatgttggacggaccggtgaccaggttctccttggtcatgacatccttgaccttcagggtgtcgtaatcctcggaggcgatgaaacgcatgtcacggttggtgatgatgccgacgagcttgttgtccttgtccaccaccggcagaccggagatgtggaacttgccgcacagcttgtcgagatcggccagcgtgacctcagggttgacggtcagcggatcggtaatcataccggactcggagcgcttgaccacatcgacctgagcagcctgatcgtcgatggacaggttgcggtgcagcacgccgataccaccgttacgagccatggcgatggccatctcggactcggtcacggtatccatggcggcggagagcaccggggccttcatcgtgatattgcgggtcagatgggtgctggtgtccacttcggaaggaatgacatccgtctcgttcggcaacagcaacacatcatcataggcaaggccgagcttggcgaaaatcgggggaaggggggcatacgccgactgggcgtttaattcatcaaggtttgtagccatgtaaacactatatgaaaatgcgctgaccttcacgacacacgtgtgagaactgtccaatcacatatggctcaacgcgtgcggactgctatcaggaagggttttcctgtccgctcgaatcagcgccggcaaccggcagcgattcgcttccggaacgcgtattttctggggttacgtcgtcatgcactgccgtggcatgctgcgcgttgtggcgcgccgcttccaacgtagcgttctcttcctgtatctccggaatacgatgcttcagatacgggtacatggtggcgatggtcagtacgaccacggcaatcgccataccaaaggcaacgtgctgcgccttgaagaaaagaatggtcaacgacccaaacgcgatcaacgccgcccaaccccaaagaatcagcacggctccacgaaccgaatggccgatgcgcagcatgcgatgatgcaggtgcatacggtccggatgcatcggcgactgccccttggccagacgccgcacaatcgccaggcacatgtcgagcaccggcaggaacagcaccagaatcggcaacagaatcggcatgaataccggcagatagatactggcgtgaatcgatgccggatcaagacggccggtcatgacgattgaggcgcaggtgatgagatagccgagcagcatcgagccggaatcacccatgaacaatttcgccggatgccaattatgcaggataaagcccacacagatgcccaccatcatcacgtcgatcagcgtggccagcgaggcataactgggcgagtatcgggcgatgatgtacgaatagatggcgaacgcgataccgccgatggccacgatgcccgaagccagtccgtcaagaccgtccacgaaattgaccgcgttgatcgaagcgacaataaggaatgccgtaattgccatggacaggctcggggatgcggtgatcagagagcctcccagcggcagcgaaataatctgcaaaccaccccaggccacgaaaacggaaatcagcagctgaccggcgagcttcaacatccagtcaagatcccacaaatcatcggccatgcccagcagactgatcataatgccgccggcaagaatcacccacatctggtaattaccttggaacagacccgcaaggaacggcgttctgctggcaaagatggtggccacggtaaatccgatcagcatgccaaggccgcccatacgcggggtgggaatggtatgcacatcgcgggcgcgcacttcgccaaccgcgccgatctcgatggccacgtggcgaatcagcggagtcaccagccaggtgacgccacccgcgatggccgcgaccagtaagtaaatcctcatgcgcctaatcccccgccattgaggtggagggctttgcgaatcatggattggggaatgactccctcacgaagaatctcaatgccgtctctcgcatacggatccgctttcaccacggtgctagatatatggccttgtgtgggcccgccatccagatacaaatcaatctggttcccgaacgcttccacggcctcatccacggtctgcgcgctttcatcgccggaacgattggcgcttgaagcggccagaggaccagtagcacgaagaatctcaaggcagagcgccgagttggggatgcgaatgccttgcgtgccgggcctgccttccgcggtgtcggccaacgtctccaacgtgcaatcggggcgcgcgacggcaatcggcgaaaacgcccccggcaggaaggcggcagaaagacggttcagcggcgaaggtagttcgagtccgagctcgtcaagttggtcagtggaatcaagcagaacctgcaatgccttgtatcggggacgccgcttgagttcgtagatgcgggcgatggcagccgcattgcgcggatcacaggctacgccatacacggtatcggtgggaatgacgatcagtccgccatcatgaatgatgcgtgcggcctgagccaacgactcatccgtgaccttccgcgttgcgctcataccgtctccgttcacctgattcatcacaatctatcattgcaccattgtgccccgacttgcacaacgacgatgaccgggtttcgttccgaacggcatgcaccgtcccgggcgaaacccggtcaccatcaattcgaaagcaacctgtgccagcctatgcgtcacgcgccgaggtatgccttgcgcaccttctcgtcgtgcagcagatccgaggccttgccttccatcgtgatcttgccggtttcgagcacataggcgcgatcggcaatggatagggccatcttcgcgttctgttcgaccagcagcacggtgatgccgctcttgcgcagagtgacgatgatgtcgaaaatctccttgaccagcagaggcgaaagacccatcgacggctcatccatcagaatcgtcttcggatggctcatcagggcgcggcccatggccaccatctgctgctcaccgccggagagcgtgccggccagctggcggcgacgttctttcagacgcgggaagtagtcgaacaccatctcaagatccttgccgagattcgactggtccttgaggctgaacgcacccatctccaggttctcctgcacactcatgcgggtgaacacatggcggccttccggcacgtgggccatgcccagggtgacgatcttgttcgcatgcgtcttaagcaggtcatgaccgtcataggtgatgctgccggacttggccggcaccaggccggtgatggtgtgcaaggtggtcgttttaccggcaccgttggctccgatcagggagacgatctcaccgtcgtccaccttcagactgatgcctttgaccgcgtcgatggcgccgtacgagacacacagatccttgatttccagcatcagcgtgccccctcttcttgaatcgtcttggcgatgcttggctccggctcgaccttggcggtcgagtcgccatccacatcatcattgctgtcgctacccagataggccgagatgacctgcgggttgttggcgatctgctccggcgtaccggatgcgatggtacgaccgtaatcaagcacctgaatgcgctggcaaacactcatcaccaagctcatgtcatgttcgatgagcaggatggcgatgccgaaacgatcacggatcgtattgatgcagtgcagcagatcctcggtttccgtggggttcatgcctgcggccggctcgtcgagcaacagcagcttcatgccggtggccaaagcgcgcgcgatctccagcttgcgctgctggccgtatggcaggttggccgcttgcgtggccgccaagccttcgaggttgaaaatgcgcagcaggtcgatggccttctcatgcatctcatgctcctgcttccagaagcccggggtgcggaagatggcgccgcccatatggtaggagaacgattcgtcaaaggcgacgagcacattctcctcaacggtgagctgcttgaacaggcggatgttctggaaggttctggcgatgccggcacgaaccacctgataggtcttcttgccgttcatgtgttcgccatccagccagaaatcgccctcggtgggcttgtacacgccggtcagcaggttgaacaccgtggtcttgccggcaccgttggggccgatcagaccgacgagttcgcctttgttgatggtcatgttgaagtcggatacggccttcagaccaccgaaggtgatgccgagatgttcggctttgaggatgggctgggtatcgttgctcatcgtgcagcctccttctcggttgcatcggccggttcgttgacggctttatcggacttatcagcagccctgtcgttcttgccgtttccgcgaagcagcagccggttgatgagcttgggcagcgagaactcccatgaaccaaagatgccctgcgggcggaagatcatgacaagcaccagcaccaccgagtaggcgagcatacggtagtcagcgaaggcacgcagcagctcgggcaggatggtcaggccgatggcggagacgatcgagccggtgagcgaacccatgccgccgaacaccaccatgatcacgtagttgatggagttgagccagccggccatggtggggttcaacgaaccgatgtactgggcgaagatgccacctgcaatgcctgcaaagaatgcggaaatcgcgaagacaagcaccttaaggtacgtggtgttgagtccggaagcgcccgcagcgatctcgtcgtcgcgaatggccttgacggcgcgcccgtaacgggaacggccgaacatgaagagcacgaccacggtgaccaccatgatccagaacacgacgtacaggttggcggtgcgttcgatgccgatcagggcctgtcccgcggcacccttgtcaaggcccatgccgccggcaaccttgaggttttggatgatcacacgaatgatctcaccgaagcccagcgtgatgatggccaagtaatcgccatgcagtcgcagtgccgggataccaatcaggatgccgaacacacacgccacaatgccgccgatcagcgtggtaatcaggaaccttgcggtggggtcaacgccgatgccggccgcaaccatgtacttggatgccagtgcggctacataggcgccgatggcctcaaagccgcagcaacccagcgtcagctggccaagcacaccgatggtgaggttcagggatgtggtcatgatgatggcgatgcatgcggtcatcatgatgcccttgatataggaatcggccagaccggattcgcacagagccatcacgatgccgaatgtggcaaggatgcctaggaagcacaccacataggattgtgtggtggaaagcattgtcttcttcatacgatcagaccttctccccttcgttcttgcccataatgccggatggcttgacgagcagcacgatgatcaggatggcgaacacgatggcatcggagaatgccgaggtgatgaggcctccggtgacagtgccgatatatgccttggtcagactctcgatcaggccgatggcaagaccaccgatcatggcgcccgggatggagccgatgccaccaaggactgcggcgacgaatgccttcaagcccaacatggcacccatcataggcgacacctgcgggtaggcggcgcagtacatcagcgaggcgactgcagccagaccggaaccgatggcgaaggtcagggcgatggtggagttgacgttgacgcccatgagcacagcggcctccttgtcttcggagacagcgcgcatggccttgccctgcttggtgaacttgacgaacagctgcaggcccaccatgatgaccaggccgatgacgatggtcagcagtgtgtctccggaaagcttgagcttgccgaaggcaatggacggcaggtggaaaatggtcgggactgtctggaagtcggcaccgaagatggcctgagagccgttctccagcagcagggacatggcgatggcggtgatcagggcggtcatggaattgcccttctcgcgcaccggcttgtatgcggctttttcgacgatgacgccgacggccacgcacaccaggatggcgggaatgaccgccacccaggcgggcaggcccatggcgacgatggcgggaatggtgagcatcagcacatatgcgccgaccatgatgaaatcgccgtgggcgaagttgatcaggcggatgatgccgtagaccatggtgtagcccaatgccacgagtgcgtacacgctaccgattttcaggccattgaatagctggctgacaaacatgatgatctgatccatcactgctccccctttctaaatctcattgtgtgttgaatgcgtttattgaatgtctgatgatgcgccatgaaaacgcgaaagggagagggccgggaaaccggccactctcctatatcgcgcactcatactagagcgcatggattggaatcatgcagcggtgattcacttgggctgcacggtggtgttgtagacaggcttgccgtccttcatctcaagcacgatgacggacttggtcggggagccggacttgtccatcgtgaacttaccggtcacaccgtcgaaggtcatgccggccacggcgttgcgcacatcctcacgggtggcgttcttgccggccttttcgatggcctgcttgatcatgtagatcgtgtcgtagcccagagcggcgaaggtgttcggctcggcgttgttcttggacttgtaggacttgatgaagtcctgcaccttggagttggtgttgtcgtcggcggagtagtgggtagtgtagtaggtcttgttgtactgggccttgtcaccggtgagtttgaggccgtcgtagccgtcagggcccatcacgtagccatcgaagcccacggaacgagcttgcgggatgatgtacggaccagccacggagtagtagtacggagcgtaaagcagctcagcaccggaggcctggatcttctgcagctgagcggagtactcggtgtcgtcggcggaggaggagctttccttgtccaccacttcaagaccaagcttctcggcggccttggcgaaagcctcacccacgccggaggagtacggatcaccggtaccgtagagcacggcgaccttcttgaccttcaggttctcggccgcgaagcgggcggcgacctcaccctggtaggagtccttgaagcaggtgcggaacaggtagttgccggtttcgatggaatcggaggtggcggccggggcaatggtgaccagcttggactggtcggccagcggagccacggctgcggtggtggcggagatggtcggaccggccacggcgagcacgttgttgtcgccaacaagcttgttgtaggcgttggacgcctcggtggcgtcgcccttgtcatccatggactcgagcttgaccttcttgccgttgatgccgcccttggcgttgatctcggaaacggccagctcgaagcccttgacctcggcctcgccgtaagcggcagcggtaccggagttggtggtcacggtgccgatggtgatggtgtcaccagatgccttggcgctggagctggaggagtcatccatgctgccgccggagcatccagcaagggacaacgccataactgcggccgcgctggccgcaatgaacttagtggagaacttcacgttcatcctcttccttcttccttgggatattgcaacatcgttcatcagtcaatcaacgcgcgggatatgcgcgtgagacgttccgttcgcataattcacataccacagaactgcatcacacggcttgtgaccgtcatctacgtctctctcattcgatgtttgtcgcggactgttataaccagacccgctttgaacccgcaataaattgttcttattatgagacagcgcaattacggaaacgagaatgcaagcccaaggaaatgtgggattcgtgaggcttaggaaactgcaaacaggtagcggtcacgacccgtccagtcctggccggtcgatgcggcagcgaatccggtggccctggcaaaggccacgagacgatccccctgggtcacgtcatgttccatgacaagcgcgcccccaggcttgagaagacggcaggcccgctcgataatgcgctcgggaatcaacgtaccgtccatcgagccgccatacaaagccaattccggatcccaatcacgcacttccggctgctcgggaatatcggtctgcggcacgtagggaggattggtgatgacgatatcgacggtgccgtccaattgggccaatgtggcgaaggacgtggcatccgcgatttccagatggtaattcgaggcaatggatgggtactttttcgcggtttccgacagattccttcgcgtccattcggcggtgttcggcgacagctccaccgcccacacctggctgccgggcacctcgctgacaacggacagcccaatcgcgccggagccggcgcacagatcgaccacacgaggatggatcatgccgtttcttgtcagccagtcaagaccgacctgcaccacggtttcggtttccggacgcggaatgaacacgccagggccgaccttcaggtcgagatagcggaacggcgcatgaccggtgatgtactgcaacggctcacgcttggcacggcgggcaagcatggattggaagcgggcaagctgttcggctgtgccaagctcctcccccatcaacagagctttgtcgacatcgcgcaactcaacacctgccgcctcggcaaggagcagtttggcatcatgctcaggcgtctcaatgcccgcctcacgcaattgcacggcggcatcacgaatcacatcggcagcagccatcacatccctatcttccggtgccttaattatcacatagtgtaagggtttggccggtaaatgcggtgctcgaccgtaggcttgaccgaacggcctagagtgtgtcgagcattgtatctaccggccaaacccgctcacgctactatcacttctgattggccagacggtcggcttcgtcggcttggatgtcggagtcgattacggcctgcaggtcgccgtcaagcacggcatccaggttgtatgccttgtaattcgtacgatgatcgacgatgcggttctccgggaagttgtaggtacggatacgctcggagcgatccaacgagcgtacctgcgagtggcgcatatcagccgcctcagcggcctcctgctcgtgcttcatggccagtagtcgggacttcagcacgcgcagggcggaggcacggttctgaatctgcgacttctcgtcctgcatgttcaccgtgatgccggtaggcaggtgggtcatgcgcacggcggaatacgtggtgttcacggactgtccgccaggaccggagctcatgaagatatcaatcttcaggtctttcggatcaatctcaatttcgtcatcgtcctcgtcggcttcggggaaaacaatcacaccggccgcagaagtctggatgcgcccctgtgattcggtgacaggaatgcgctgcacgcggtgcacgccgccctcgtatttcatcgaagcccacacgccgtcttcgggagcaggcgtgcccttggcccggatggcaatctgcacgtccttgacgccgccgagctcggtggtgttctcggactgaatgttcacgctccagccgcgcttctcggcgtagcgggtgtacatacgcagcaaatcaccggcaaacagtgcagcttcctcgccgccggtgccggccttgatttccataatggtgtctcgcgcatcatccggatcacgcggaataagcgcggtgcgcagcttttcttccgcgcccggcagttcggattcgagacgcttagcttcctcggcgaagtcggcatcctcgccggccatctcctgagcggcttccaagtcatccttcaattgcaaccaagctttgtaggctcccacaatggcacctagctcggcatgacgacggcctagtttgcgcagcttgtccggattggacacgacttcggggctcgccatctgctcttcgatggactggtactcctcaagtgcggtcaccgccgcggggaactgttcgtctgccatgacacgctttctggttgtgttgtaatcaggtcaaaagaatacaaaaacgccagtcctcgggcgggcatgccgaagcatgccgggccgaataggactggcgcgaagtatgctacttgctcttcttgccgtagcgcttctcgaagcgagcaacgcggccaccggtatcgagaatcttctgcttgccggtgtagaacgggtggcactgagagcacacgtcaacgaacatgtgatcttccttgccagcagtgcgggtcacgaaggtgttgccgcacgagcacgtcacctcaacggggtggtaatcaggatggataccctgctgcattttgcgtctcctatggattcgggggacccgggtcgtcatgcccctatggcagacgtgaaccggaaccttacggattgtacgcgcctatatggacggggaatacgttgcgctgtcggaaaagagtggggccgcaggggcttgaaccctggaccgggcgattatgagtcgcatgctctaaccgactgagctacggccccacgatgacgtactgcgattgcagagtagtcaacttgccaaagtgtagcacgaccccggtcgcaggaacggataacaaacgaccactcccgtatgatgttgtacgcgccgcccaccctgatgcgcgagttcaacgtgcccagcagcaccgtgcaatggctgaccaccggattcatgctcaccaacggcatcatgattccggtcaccgcattcctcatcgagaccttcaccacacgtcagctattcctgtatgcgatgggcatggtcatcgcctttgctccggcactgggccccaccatctccggtctgctggtcgaatggctgagctggcgttggatgttcgcgctgctggtggcaatcgccggcggcgtgatcgcggccgcctgcttcacggtgcacaacgtgggcgagccgacccacccgcatatcgacgtgctgtccgtggtactttcgaccttcggtttcggcggtgtgctcttcggcttctccactgccggcggaaacggctggggcagcatggacgtgctggtatctctagccattggcgtaatcgccctgacactgttcatctggcgccagatgcggctggaacagccaatgcttgacttccgcattttccgcatggtggccatcgtgtgcatcatctgtctggtggcatccttcttcatccgagaccgcggtcttcatcccggtcagaagcgctgaaaacatgctccagggccgccagcacacaccgacggcccaagcccccccccaaaaaaaaacagagactacaactcaggacggcagcctcgcgaaagccccatcaatcgcgcgcctgctcaatcagctgattcagtatgccggccttctgggcggcaaccgtctcctcccaatccagtccggtatccttggcccgtccgtagaagaatctgaccaaaccgggaaagtcgggccggtatccgctttgtcggaaacttcgcgctatggactcgcccgtcttgaggtcatctggccggtgagcctcatagataggaatcgcgcaaccctgccacttgcctcgcacacgggcaatgcggttgacaattaggccgccacgtgcgccgtcatatttcgctgcttgtgggcttactaaatcataaacaccaccattaatgaggtcctcgaccgtcattatccccttcaccgcattggcatccttgagccaaaacatcgaggcgaaattggtgtcatcaatatcccggaaatcctgcagcttccgttcccccacctgcgggtcgacggcgtacatgtattccgccatagcccggaacggtgagatgccgttatctttgttatgcactagctcaacgcgcatatccgagccttcatctccggtcagaccgatgtcgctgatcgagcaatcaaaggaaaaccaatcccaaaactgccactcgatcatccggagcagaccctcgggatgtggcttgaatgggttcaaactgacttcacggtaaaactcacgccgcgcctcggcatacacggcaagattgcattgcttgaacatatcaacgacatccttggtatccaggattgccggtgctccggaatcttcaacggcggcagtggcttcggtcatggtcggtccttccggtcaagtgtggacggcaggccgcatcgcccgccgtgagacacactgtacggaagccggcgacccgccgcaacccgttgaaacaaacttgtggatatgtggaaatccaatgattccaagggatgccgattgtgcataaccatgccatcgataggtggataaccgccggttcgatgcacctcatgcacgaggttatccaccatccacaggctctacggcgtgtcatccacagtcggcgatcgaggcgtatccgacccttgccaaacaccctgccgcttcgaacgacgcctgccaatacgacaagtggtctgccgccatgatgaggacgaccggccaccggttgcaacgaatccgtcagccggattcagtcagatagctagatgataatgccgttgcagtggtcgacctcatgttggatgatctgcgcggtccatccagtgaacgtggcgtgacgcgctcggaaacgacggtcttcgtaatcgacctcgatacgacggtaacgcagcgtgcgtcgttcgccggccaaagacaggcatccttcctgggtgtcgaaggcaccatccgaagcggtgattacgggattgagcatcactgtgacgcgaccgccaaggtcctcgtccacgaaggctatgatgcgcttgcccacgccgatcatattggcggccattcccacgcagcgcgaacggttggcctccaacgtgtccacgaggtcctgcatggctgcctcgtcgctaggctcggctggttcggacggcgtgcgcaggaacgagcgcgatgtcataatggggcgttgcatcaggcctcttcgtgccagtggggattctggccgaaggtgtagccttcgggattatccatcgcggcgatgtcggccatgtcctgctcatccagctcaaaggcggtcagatcgaggttctggcgctgacgctccgggttgagggacttcggaatcgccacgtcgccgtactgcagatgccaacgtaggatggtcttgacaacggagataccatgcttggcggcgatacgcttcaagtccggatcgcgcagcatctggttggcacggcccagcgggctccacgcctcagtgatgatgccatgcgcgttgtcgtaggccagctgttcgtgctgctggaagtacggatgcagctcgacctggttgacggcaggggtcacgcccgtatcgcgaataagcaaatcaatgtgaccgggcaggaagttgctaacgccgatatgcttgaccagcccacgttcacgggcttcgaccagcgcctcccatgcctcgacgaactgaccttggctcgggttcggccagtgaatcaggtagaggtcgatgtagtcgagtcccatgcggcacacgctctcctcgatggtgagcagcgcctcgtcatgggcgtggtggcggccaggcagcttggaagtgacgatgatgtcttcacgcggcacaccggattcgcggatagcgcggcccaccacgccttcgttctcatagttgaaggcggaatcgatgagtcggtagccctgatgaatggcagacttgatggcgtccacaccggtcaggccgttaaccttataggtgccgaatccggtggcgggcagctcaaggccgtcgttggccttgcgaatcggagtgactggtggctcaagcatgatagtcctcctgcttctcctgtgatagaatatcgattccatcataaagccaaccgatacgcggcaggcgaactatttgacttcccgcaattccggcggacggcgagtggagaagcggaacatgagtgcggcgagaatcacgccaagcaccgccatgccggtgaacaccatcatgctttgcgggaaagcggtgaaataggagtcggcggcatccgccccattgttcacggcggcggccgaaaatccagaaatcagcgcgctggccacagcagtgtcgttggctgcgttgctgactgtgttgttggtcgcgttgttgctggcgttgctgactgtgttgctgcatcgttcataagatttgccctcccctccattcgttcgttttcggtgttgccgatgggctggccgccggttgtaccgattgttttccgattgttaccggttgttggcgtcctgctgcatgagtcgcaaggcttcggtcaaggtgcgtaccgtggtttcgcactggtccgaggtcaacccacccagcagttggctgagatgcgcgtgatattcctccacatagatgcggcggatatctaagccgcgttcggcgagcgtaagcgtcaccgcgcggtggtcggtggagtcggcgtgcttgacgaccagcccgagttccgccaattcgccgacgagtttggtaatgctcggcgtagtgacgccgaggaatgcgctgacgtcgcccacgcgcgcggtgccggtatcttgcccattcggttcgttgatatgccagacggcgtcgatcacgtggacatagcgcggtttcatgcctttcggcaatgccggcatcagttcggtgatggtcttggccttccagcaggcgtctataagactgcgtacgtcatccaccggcagctggccgggcttggacttggtcgcggactcagtcgcggacttggtttcggtctgggattcgctcatcgctgacccaacctccatttagttaccaatagtcattacctttagtaagggtatgcgacctctaggcaaacccaacgacccattcgctcacgttgggtttcgccattttcgggagaaaaacaacagtgcggtgattcccataacgagaatcaccgcactgtactgttcgcgattgtttacgcgttgctatctgcgtcgtgcgcgttatctacgcaccgccatctgggtcaccgcaagaccggacgccttgcggtcggctgcgtcagcgaagagccagattggcggcaccgatgaggccggcgtcctggccggcggtggcggcgacaatcttggcgtgagcacggtaggcgctgccttccaggaagcgctggtagttgtagcgggccggctccagcaggatgtcgccgacggccaccacgccgccgccgatcacgaacaggtccgggtcgagcacggcggaaacggcggccatcgtgcggccgagccattcaccgatcttgccgaatgcgtacaggccgagtacgtcgccttcctgagctgcctgggagaccatcgggccttccagcttggcgatgtcgccgccgcacagctccatgaggcgcttggcatcctgcgggcgacggcgcacggcagacttggcgaagttctccagtgaggtgcccgaggtgtagcgctcagcgcagccgcgcaggccgcagccgcagtggtcgccgtccgggaccatcggcaggtggccgagctcggcggccatgccgaaggagccacggtagagctgtccgttgagcacgatggcgccgccgagaccggtgcccacggtcagcgcgaccatgttggagctgccctggccggcgccgtgcacgaattcgccccagccggcgcagttggcgtcgttttcgacaatgaccggcacggcatggtcgatcatcgcgccgacatgctcggacaaatcgtagttaatccatgccggaatgttggcggagaaggtgagcgtcttgcgatccgcgctcacattaccggccgcggagatgccgatggcctcgatatcggtgtggccggcggcgacggcttcgcggtagatctcggcgatgtgcttgttgatggcgtcggcgtccatcggcgtggggacgcgccaacgctggatgatgctgtcgtttgcatcgcagacggcagcggcgatcttggttccgccgatatcgatggcgagcgttgtcatggcttactccttgaagactttcgtaacgtacgagatagcgaaaatagtagtgagccgccatgacctcccaccgcggattttccgtggttcgtcatgcgtcgcaaacattccgccgatgcgcttcctcatgcatttcacccgttgcaaacgggcgcctcccttaacgccggcatcggtgcggacggcgtgtcgaatcggatgcattcactttcaccgtccttgcggacggcatcgaagaacggcaggaaacaaaaaaactcccgacatgcatcgggagtttggtggcgaccccggccggacttgaaccggtgacctccgccgtgacagggcggcgctctaaccaactgagctacggggccgtgcgtgcctcgatgaggcacaaaaggatatgctacagcatcatcggatcatgacacgccgtctgatacgtcgttccttccaccggcgaaccgaccacaggtgcggtggacggtatgcggaccatatcgttcgaccgcgcacgaccgcactccccataagacagtagccgtcatgcgtcaacgcatgttgtgcgacgacgcggcacgacgcacggccaccgaggccagtaaaccgatgaacagcatgatgccggcgaccagaagcgtccactgacctccttcgatgaaccctgaagtcatcgcatcggcaatcttcggcgcctcgtcgccgaaccgggccgccggtccatcaccgctgcggaacacgccgatcactccacccgccgaaccgctgaccgcctgggccagaccgtcgccgaccttggcgggcagcccgagggattcgagccgcgccggcaatgttccgttgacggccatggccagcgacgcgccggagatggccgaaccgacggcggtgccgagctgtcgaaccgtggactgggtggccgacccttcgccggactgcatgatcggcacttcggagagcaccacgctggtcagctgcgcggaggcgaagcccagacccagaccgtacgcggccatgggaacaagctgccaccacacagagaaccccacaggcataaggaccgcgaccagagcgacggcgatgatctcgatcacaagaccgagttgaatcacgccggccggggtgagcttggcggccatgacatgggcctgcgcacctgcgacgatggaccccagacccatcacggccagcatcgcaccggcctgcagcgtgttgagcccacgggcgttgatgaggtacagcggcagcatgaacaccagcgcgaattcgccggcggcgatggccgcagccgccagattgccccacgagaacgtcctgatgcgaaacagggtcatgtccagcatgaccggccgaccggctttgccccgcgccgactcgaagacgatgaaggcagccagcagaagcgcaccggcgatcaggcagatcggcaccggcgacaaccagtctcgattccagctcaacccgcccagcttcaactgcgttgaggtctgcttccaccagccgtaggtctcgccttcaataagaccgaacaccagcagggccgaggtcagggcagacagcaccacgcccggaatatccacaccgacacgatgggatcgggcatcccgtgcggcatccgcggcgccggcgaccgaggcgttcccaccggtttgcggcaccaggaagatggccgacacaaagaccgcgatacccaacggcaagttcaccaggaaaatccaacgccatcccagagtctcggtgaacacgccaccgagcagcgggccgagggcggcggccgaactcatcaccgcaccccagacgccgaacgccgcggcacgatatttgccccggaacagggcggacaccgtggacagggtgttcggcatgatcatcgcgcctccgatgccctgcagcgcacgggcggcaagcagcatccccgcaccctgcgaggcggcggcgagcgtcgaactcgccacgaagatcactgtaccgacttgaaacaccagtttgcgccccctggcgtcgcccaacttgccgaaaggcagcaacaacgcggcaagcacgatgttgtagagcgaggtgacccactgggcgtcggtcaggttaatgccgatgtcggcgatgatggtgggaatggagacgttgacgatcgagctgtcgagcacgatcatggccaaccccagggccatcacccacagcgcgccccacggcggcgcctgggcaggcagtggcgacgaggccgtcggattcgttgaagagatcgaagacgcatcggcctgagtctgatgctgagatcgggatgcatgatccataacggggtttcctctcattgccatgattgcggcgaccgacacgcctatgcgccattcacggtacatccgcggcctagaccgtctcgccggatttcgcgggacattccgggcgttcagccatgggcgtaacctcggcggatcactgaagagaggagcaccaaagacggccgcactattccagatgcgtcatttcgaaatgaaagcccggcagaacgccggaatcgcaacgatcgacaaatcgccagacgatacagggccgggctctcgctcaggaaacagggcatgcccagcgcccatttaccggcgtcggcaatgatggcatcgccgccaccttccacgtctcctcccgatggccgaatcgctaattcccgcccgccagaaccccattgcatcgtgtagacgggatatggaataatccacaaggtgcttttgcttgggaccgaggcgccgcgatgacacggaaatccagggacgggcggcatcaaatgggtcgttcggaaaccctcgaaaccggccgcgtcgttccacagtgtgtcatcacggaatccaagcccggcaaaacgttgaaattgcaacgataagacaggataagacacttatatggctgaatttgtgtttcagatgatcaaggcccgtaaatcctacggcgaccgagtgatcctcgatgacgtgaccctgagcttcctgcccggcgcgaagatcggcgtcgtgggcccgaacggtatgggtaagtccaccctgctcaagatcatggccggcctcgagaccgtgagcaacggtgaggccacgctgaccccgggcttcacagtcggcatcctacagcaggagccgccgctggatgacaccaagaccgtgggcgagaacatcaagatggcattcggcccaatcgccgagaaggtcgcccgcttcaacgctatcggcgaggaaatggccaacccggacgccgactttgacgcgctaatggaagagatgggcaagctgcagaccgaaatcgacgccgccgacggttgggatctcgactcccagctcgagcaggcgatggacgctctgcagtgcccggacccggataccccagtgaacgtgtgctccggtggcgagcgccgccgtgtggctctgtgcaagctgctgctcgaggctccagacctgctgctgctcgacgagcccaccaaccacctggatgccgaatccatcctgtggctggagcagttcctgcaccagtacaagggtgccgtcattgccgtcacccacgatcgttacttcatggacaacgtggccgagtggatctgcgaggtcgaccgcggccacctgtacccgtacaagggtaactactccacgtacctcgagaccaaggccaagcgtcttgagattcagggcgccaaggatgccaagctggccaagcgcctgaagaacgagctcgactgggtgcgctcctcccccaaggcccgtcaggccaagaacaaggcacgtctggaacgctacgaccagatggagaatgaggcacgcaacaacaagaagctcgacttctccgagatccagatcccggccggtccgcgtctgggctccaccgtgctggaagccaagcatattcacaaggccttcggcgagcgcgtgctcatcgacgacctgtccttcacgctgccgcgcaacggcatcgtcggcgtgatcggcccgaacggcgtgggtaagtccacgctgttcaagaccatcgtggggctcgagccgctcaccagcggtgaactgaagatcggcgataccgtcaagatcagctacgtggatcagaaccgcgaaggcctggatccgaacaagaacctgtgggaggcggtgtccggaggcctcgacttcatcgaagtggccggcgtggaagtgccgacccgcgcctacgtggccagcttcgggttcaagggcgccgaccagcagaagctgaccggcgtgctctccggtggtgagcgcaaccgtctgaacctggccctgaccctgaagcagggtggcaacctgctgctgctcgacgagcccaccaacgatttggacgtcgagactttggaatccctcgaaaacgcactgctcgaattcccgggctgcgccgtggtgatctcccacgaccgttggttccttgaccgcgtcgccacgcatatcctcgcgtgggagggcgatgacgacaatccggccaagtggtactggttcgaaggcaacttccagtcctaccaggagaacaaggtggcccgtctgggtgaggatgcggcccgtccgcaccgtctgcacaagaagctcgtgcgcggctaagctgatagccaatgcgagaacaaggcatatcgtccacatctatcgaaagccgtcccgaaaggggcggctttcccgtcgctccgcataaccgaccgtttaccttccaaacaggctcgttacatttcgttcccggaactcttaaccctcgccggatagactgccaatcatacgttggaataataaaaaccgaatatcgaacaggaatcgaggaacgttatggctcaggcgaccgccgtcactccgctggatcatctggtgaaagtgttgaagttgggtgagccttccgcttaccgcaatcacacctatatcaacggcgaaagcatgtacttccccaccggccgcgtttacggcggccaggtcatcgcccagtcggtggtcgccgcatccaaaaccgtcaacgcatcgcgtctgccacactcggtgcatggctatttcatcgccgccggcgatattcgtcaggatctgctgttcgacgtggagaacctgcgcgacggtcgctcgttctcggctcgccgtgtcaatgtcacccaagccgaaggatcgattttgactgctatcgcctccttccaggaaaccgatcaggaaggtgtggagttcgccgatccgatgcctgaagacctgcctgatcctgaaatgctgacctccgccaaggagcttatgcaaccgttcgccgaaaagtcgccgttcgccaattactacgccgaaaagtcgccatttgatattcgccacgtgacacccaccgtgatgctgcgagccgataaggattccgctgagcatgattccggcaagcagatggtgtggatgaaggccgacggccatgtcgatgtgtcgcaggtcatgcaccgcgcgatgctggcactcggatgtgatcaggtgatgatggaaccggtgctgcgccgagccgggctgtcgatttccacaccgggcatctcgtacgcttccatcgaccactcgatgtggtggtatcgcgatatcgacatcaacgaatggcacctgtatgtgcaggacaccccgattgccgcacacggccgcggcctgggcattgccaaggtgtatgcgcgatccggcgaactggtggcggccatcgcgcaggaagccatggtccgcgtgccgcaggaatagcggcatcggctcggccccatcagagggggtttagtaaggattaccgcttgtaggcctgggccatgtcgcggcgacgcttggcctctttgatcttgggattctccggaccttcgttcggcggcagctggcacagccattcgccgatgatgccgataaccatatcggcaatgcacaccactgcggcgaccgcgcattcagtgacggcctgtgcgtagaactccgcctcgatatggctcaggctcatcagaatctggccgccataccagccggcgagcgtcgccccggccaaacccaacgctttggccagcaccaacgtgtatacggcgatggtggggttgatgaagctatgcggccgcttcttgggatcggtgttcgcgtatttgtgcacctgcagggccatgaccagcacgatgatgcccagtacggccaataatccggccacgatccatggcgcgccgatcagcgacagccccgagctttcgccataggaggccaggccgatacctgccaacaggccgagtccagcaccgatcacatactgccaccacggtgtacgccgtgttttcatgactggtctccttaccttacgttctacgcccacactaccggttgaacatgattcttgctctcagcgtgattacgccgagcaacgtgcgccttgcttactgcggcggcagcacccagttgtcagacagcagtccgacctgaccggcatccggcgccatagccagcaggaaggacacaggatcgcctcccagcatggcatcaggatccatgtctagccaaggggctaacaccgatgcgtggctgtgcgcagaaggccaaggaacactgcaattcggctcgtcggaggtcacgccttccatatcaaccaaatcaagatcgaccgccaaatcatgagcggcctcgatactgcccaacacggcaatcaggtctgccgcaggcagtttggtttcgagttgcaccaccgcgctcatggcgtccggaccatcaaaatgactgacgtggtacagcggggaaatgccctgcacctgattgccgggcacactgtcaagcgagacgatggtttcgcggaatatcttttccgcatcatgcgatgccgaatccaacgaaacaatcgccttgcgcgagacgggtttctcatccgttcccgccggcgggaactggcttgcgaagcgagactgagggtggtcttcttgtgcgccggccgacaacccccaaccagcaggggcagattccttcttgcccgcgtggctgctcagcatccaatcttcgctttccagctgcacggcattgcggtctggagcgaccgccaacaaactggccaccggtccgccgtgcgcacctgccagcttggcattgggattgagcgcggcccatggagccagcacaaaagcacgctgccatgcacgcgggtgaggcaacgccaaatcgggatcggcgctggtaatgccgtcataatcgatgatgtcaagatccaaaggcctggagtcccaatggttctcgcggatacggccatgatccgcctcaatgccttgcaatgcggcaagcagctcatggctgcccatctcagtctccagctccactacggcattcaggaagtccggcgtgccatcggccataccccatgcggcagtacggtacagcggagaaataccggtcacctgcgtgccgggcagtgcgtcgatctcccgcactgcggcccgtagcgtggattccacctcactcacgttgccacccagcgccaccactgcgctatgcatggaagggatgacgggggaaaccaccgacgaagccggttcatgcagctgctccgacaaagcttgttccgcatcgccgcaagccccatcacgcacccgagtaatggagacggacacatcatcgaacgccacgacgatcggcgcatgcggcttatgcacggtgacgtcaatctgcatcacagccggtgcatcggcaagaatacgatcggcgatgagctgagcgagccgttcgataaggcccacatgaggcccctcgatgacggcgacgatatctttggccacacggccatagtcgatggtgtcgttgagatcatcggattggccggccctcgtcagattaagatgcagcgtggcatccacgacgaacgtctgcggccgctcatgttcaaaggcgagcacgccgtgggtgccattggcatgcacgccggtaagtgtgatggtatccataatgctgctttctacgagagatactggcgccagatgttgccggctatgacggcggcatggctcttggccacgtcttgcacacgtacggcccatgcgccatgttcggcgctgagagccgacagcgcagcagtcacatcgtcgcgctgggccatggtcggcccgtcctcgccgactgcaccggcctcggtgagcatcgccgaaataaagcgtttgcgcgattgaccaatcagtaccgggtatccggtgccgcggaaggtctcgaggcccgtcagcagcggcaggttgtgctcaatgctgggcttggaaaagcccagacccggatcaatgatgatgcgttccggcttgactccagcggccagtacaccgtcaacctggcgcatgagttcgtcatggacgtcggtcagcacaccatgctcgtatactgaagtgtcctgatcggggttcgcccccttggatccggcaagccagccacgccagtgctgcacgatatacaggcagtcatggtcggcaaccacatgaggcagattcgcgtccagcgtacctccggagacgtcattgatgatctgcgctcccccatccagagccgctgcggccacggacgcgcgggtggtgtcgatggacagcaccgcaccggccggaatcagcgcgttgacggcaccggtgatgcgggccagttcatcctcctcagacactcgcttggcaccgggacgcgtggattcggcgccgatgtcgatgatgtcggcgccggcggccatcatatcgcgaccatgttgtgcggccttggccgggtccaaccacaggccgccgtccgagaacgagtcctcggtgatattgagcacgcccatcaccatggtgtgcgatgcgtcgtgcaatgcttgcaaatcagtcattgtattccttttctgctcctgctggtgggagctgcccagccatgggctgactgagggtggtcgggctgtggtttaccacccccagtcggctgcgccgccagcccccgccagcaggcggccaatttattgatgaggtctctccctcagtcagccttacggctgccagctccctcatcagaaggagcttgtctccttcactatttatccagaatcaggctcatggcctcggctcgggtggcggggttgcgcagcaggccacgcaccgcggaggtcactgtacgggcggaggacttcttgatgccacgcatcgacatgcacaggtgctcgcattcggtcaccacaatcacgccacgcgcgcccgcatattcgaccagtgcatcggcgatctgctgggtcaagcgctcctgcacctgtggacggcgggcatacacctcgaccagtcgggccagcttgctcaagcccatcaccccatccttggccggaatatagcccacatgggccacgccgtggaacggcagcagatgatgctcgcataccgaatacagttcgatgtccttgaccagcaccagctcgtcggtatccacatcgaaatgcttctccagcacatcggccggcgaggcctgcaggccggcgaacagctcacggcaggcacgggcgatgcggtcgggtgtctccaccagtccctcgcgctcgggatcctcaccaatcgacttcaggaacaggcgtactgcctgacgcacgccttcttcgtcgtatgaggattcctcccgctggcgactttcggacccagaaccacccccagtcggctgcgccgccagcccccgccagcgggggcaagattctatatattcgttcatcttcatctctcccttgataccggctttacaacgacgtcggcccgatctggcatacggacgaaaccatatgccggatcggtccgaacagtcatcgaatcactcttccgtcttcataccgactgaacgcttgagactgtcgggaatctccaccggcggcttatcggagtcggggcggtgttcgttggacagccacaccggacggaccggagccttcttgatcggtgcgaagatctccgcgagctccttctcgttgagcgtttccttgaccagcagctggcgaaccagttcgtcgaggatatcgcggttctcgttgatgatggtccacgcttcggtatgcgcggtttccacgagcttcaacacctcgtcatcaatcacctcggcggtgcgatcggagtacttacgcggctgcagaccgtccatcacggtggtctggtcatcgtcgtcgccccacttgatggcaccgagcttgtcggagaacccgtattcgatcaccatggtgcgggcgatgttcgtggccttctcgatatcgttcgaggcaccggtggttggatcgtggaacacgatctcctcagcagtacggccgcccatagcgtaggccatctggtcgagcagctggttgcgcgactgcgagtagcggtcggaagtgggcatcacggcggtgtagccgagtgcacggccgcgcggcagaatcgtcaccttggtcaccggatcggtgttgttcagggcggcggccaccagagcatggccaccctcgtggtatgcggtgttgcgcagctcttccagggccatgcccttggacttgcgcttcggaccggcctggacacgatcaatggcctcgtcaatggcacggttgtcgatgagctgggcaccggcgcgggcgcacagcagggcagcttcgttgagcacattggccaagtcggcaccagtgaagcccggggtacgcacggcgaccatgtgcaggtcgacatccggcacgaacggcttgcccttggcatgcaccttcaggatcgcctcacggccttccaaatcgggtgcggccacgcctacctgacggtcgaatcgacccgggcgcagcagggcggggtcaagcacgtcgggacggttggtcgcggcgatgatgatgaggttagtgtcgttgtcgaaaccatccatctccacgagcagctgattcagcgtctgctcacgttcgtcatggccaccacccatgccggagccacgcttgcgacccacggcatcgatttcgtcgatgaagataatggcgggagcgttcttcttggcctcgtcaaacaggtcacgcacacgggaggcaccgagtccgacgaacatctcgacgaagtcggaaccggccatcgagtagaacggcacgccggcctcgcctgcgatggctcgggccagcagcgtcttaccggttccaggagggccatacagcagcacgccgcgcggaatgcgagcgcccaatgccttgtacttggacggatccttgaggaagtccttgatttcctccacctcggccacggcctcatcctcgccggccacatcggcgaacttggtggtgggggtctgaccttcgagcagcttgccgctgttcttcttgccgcccatgccgagcatgccaccggcaccgcccatgcgactcatcaggaaccagaacaaggcgaagacgatgatgaacggcagaatagaggtgatgaggtagctcatcatgctggtctgctcaatgttggaggtccagcccttagacaaatcaccgttctccacggccttggccacctgagcgccctgcgcaaaggtgtagtagaactgaacgttcttgccgtagttggtcaccttgccggtgtccggatccttcttggaatagtcgttcttgagctcaagacggactacctgcttgttatccgtgatttcggcgtaggtggctttaccctggttcaacagcgcaaagccgtctttggtgtcgatggttttggtgccgctgccagcaaacatctggaacatcagcacgaccataatcaccagtaccgcgccccacaaccacggcgactgccagaccggcttgttctcattgccgttcttacggccattgttgtcgttgccgcggttgaacgggttgttgaatgggttgccgttgttgcggttattgttcgagttcgggttattcccgttgcccgaaccgggcccctgggggaaactcatgcttgcactccttggtaaacggacggcttgaggaccgcgatcgagtcgaggttgcggtagcgttcgtcgtaatcgagaccaaagccgaccacgaactcatccggaatctcatagccggcgtacttcacatccacgtccacctctcggcgggaaggcttgctcagcagagcaaacacctccacggaggcggcgccacgacgtttcagctcctcgaccagccacgcgagcgtgcgtcctgaatcaacaatatcctctacgatcacaatgtgccgtccgcgaacatctgcggacaaatcctgacgaaccgtaatctcaccactggatactgtgcccgaaccgtaactggacagactcatgaaatcaatctgcacagggatgctcatggcctggctgaactcgaccagcgtgttcacggcccccttcagcacggcaaccagcagtgggtccttgccacgataatcgtcacttacccgcgcggcgacctcatggattttggcatcgatctgttctctgctgaccagctcgtggtcaatatcttcctcaacgtcagcgattcgcatgggctctatcttggcacacgcgaatgacgtgtttctggcgctttgctgaatatccgctgggaagtgcgaccgccccctgaccatgccagtcgacgaccaggcgattgatggcctcgatttgcgcggaacttgcgctgataccagcccgggagagcgcatgggcgatggctcgaagacggattgcctcatgtgtcgattgcagcggtttgacggcaatgaccaagctgggttctcgctccagatcattcgacttgtccgtcatgccggcagcggaggttccttgtgattccgccgttttcagggtgctgccaagggcttcgatcatggtcttatccgcctgttgatccagatactccttgtccagtctcgccaatcgtgcgccgttggcgatatgctgcgtcacatcggcaccggcgaaccgctcgatcgccggcaacaggtcatgccggatacgtgagcggagcgggtagtctcgcggcagctcgccatccacatcatcgccgttggtgggatcgtcccaataatgaatgttcaaatcctcgcagatgccggtggtttcggctcgagaaacaccgatcagcggtctgagaaacatgatgccgtcgcggtgcattacctgcggcataccggccagcgcatcaacgccgccactgcgcaacagcccgatcagcaccgtttccgcctggtcatccaatgtatgagccagcaacaccacagcggcattcagctcgcgtgccgcaccgcacaattccccataccgtgcctcacgggcggcagcctcgacgccttcgccctgcacatgcacgctggctgtacgaacagcaaccggggcaaggccacaatcgcggcatcgttcagcggtcaaagtcgccacccgatcggagcctgactgcaaaccatgatccacgatcaccgcaccgcaccgcaaaccaagactagcgcagacaattcggcaaaccgcggccagcgccatcgaatcacgcccacccgagcaggcgaccagcaccaaaggcgcgtcgggggccgcctggtgctcaccatgccgggcaaattcgggcgactgcatccctaatccggccgattccaatgccagccggacggcaccaatcgccttacgcaatcgagccgaatatgccatgcctcatcacccgccttaccgttaccgttcggccatcacagctcggccagcttagtgatgaatgcgctgatggcattgctcgcggcccagtaatccgcaggattgttaatcaccaccgcaaaagacaacgctcccccatgcgtacgggacacattgccggccatcgaggtgaccgtatccaaactaccggttttgacgcgaagcaagccggcgacatcatcactggtgtatcgcttccgcgccgaaccgaccagaccagcaaccgataatccttcggccgcaggggctccatcgccgaccgtcaggttacgctgctgcacggcggccaatgtgcgcacggtcagctgagagccaggagacagacccgagcagtcggccatagtaagaccgttgatgtcgattttgaggttgccaagcactgtccgcaccgctttggtggcgccttccgggctgttgttctccgagcgtgccagtgcggtgagtctgccaaactcctcggccaaggtattgtctgaatgacgcaacatgaacgccaggatttcggacaacgttgcggagcttaccgaagctatggggtttgcgccctgaggggcggcgtgtgccgccggctccgcctccacggtgatgccgtgctgttgcagcagaccggagaacgtcgcggcgacgtccgctgcagtgtgctgcgatagttcagggtatccggccgagtcatccgggttggcgggcgcgggcatgctgtcggaatattgacgcccgccatcgatggccatggatgataccgatgtgaaatacgtggtgtattcgccgagcacgccaccatcggcgttgcgcaggcccgtgggtatgcgggaatcgccgaataatgtgtcgtcgtagttgacgtgcaccgtggtgatgccgcgttgcgcaagggccgcagccgtggcctgcgcaagagtgttcagcccggcacggccgttaatatggtcggcatcggaatcgccggcagacagcagcatgtcgccattgcctttgagcgtcaccgtgtcgctgccggtatcagattgggtaagaaacacctgcgtgtccaacgtggcggccatgttcaacgtggatgatgccgcgagcgcggtaagcgtcttcatagtggatgcgggttcgcgcggcgtgcctgactcgtgctcggcggcgacagtgccccgggcatcctcgaccaccaccgaaacatcagagcccacgccttcagccgccagcagctcgttcatcacttcgcccgcagccgcggcgtcgatagtcttggtagtgtcaagggaaccggcgatggtgccgccttgcttggccgaaacggggtcagcgaaagtgggggcgtcgaccggtttgagggtgagcataccaggcatgacatcgtacacatctgcaatgcagtagcccgcgaatagcgcaatcgttatcagcacggagatgattacggtaatcgtgcgtcggacggatcggcgcgcgctatgattcgccgctccacgccgttggcgacgtgacatcgcagtggacgtcatcagactccctatctcacgggtcggttatttctgtagtgatgcgaatgaatcgagcgtgctcacgatcgacagtattcgcgcctccaacagcttaccgcccagccatgtcccaagcgccagaacaccgatgccgttggctaatgcgaccggaataatcaccagccagccgacgatccccgcatggatgacgagcagcacgatggcggcgatacccgtgggcagcatcagcagcatgctgccaagcatatagacgaacgggaagaagccctgagccatcgctcggccttgcggcgaggagaacggcttgtccattgacgccacgggatacatgagcacacaggaggttatctcagccacaccaagactgctgaagcccacacctaggcccacggcaaggaagaacaacccgatgatgagatcgtccggctgagcccagcgcccagcagtcacgccgactatcactatgcagcccacatacagcaatgccatgtagatgaccatgatgccgacatagactcgcactcggccgagcctatcggcccaaccacgcacaccagcgatgacctccatggtgaaaccgcggccatcgtaggcaagaccattgctttccacaatggacatgaaccatccgcaccaaatcatcgactgccagacgattgcgtgtataccgtgcgcctggaaggcaaagataattatgaacagcaccggcatggcgaagatcatgacctgacgtgggtcccgcttcaagtaggtgagcacgcgtgcggaaatcgcgccggacgtggaatcgggcatccatgagaatgcgccgacgcctttcacggttgcgctctgcccagcgactccaaccgtcaggcgttcacgacgcaggcaccatgtgcacacagcgaagcacacaacccatgcaaccaccaatatggcgatgcgcgcgagcgctggcaaccatgcaccggacagcacatcgaacggcaattggaataccgcgccgaacggggtccatgccatgaccgccgcggtggcgctccatgcggatggatcaagcccgaacgcgatgccggaattaaccagaatattcggcagctggcaaatcaccacgaacaggagaacaatcacaatatagaatgtgcttttgcctcgtttgctggtcaccagtgtggtagataaggcgatcagcattttggaaatgctcatcattgtgatgacggcgagcggtgcggcaacgagctcggcgatcaccactgccgggcccatggcacggtaagccagcgaccagagcatcaaggaaatcacacctgtgatggcggggagcccggataagccagaaagcagcaggccgaattgcaaattgcgatctgcaataccgtagagtgcgaatttgcgcgggctcatggtggacccttcgcccaacatcatgagctgaatcaaaccgatgaatacggtgattgtcgcaccgaccagcacggcgaccatgttgacgatgccgcccggcccgagaatgttgaacggatagccgtccgagtccatggtggaaggcgggagcataccgacgaaccatgcgagtataccggtcccgataatggtgccagcggcgaatattgcggaaagaacgtaggcaaccgtctgccataccgatttgcgcagcgccgcgagggtgagcgcccaacgcagtcggaccagagtgattgcggtactcattaccgggcctcgttgtctgcattgtccgcattgtccgcattgcttgcgctactcgagccgccgacaatatcaggatgaggctgaactgtctcctgagtgaaggactgaagcggggttgattggacgagttgcgatgctgattgcgtggacgcaacaggctgcgctgccggctgattgggctgtactgccggctgaccatcatgcgatagaccaccatcgagccatgcgagatgtgccgcttcatggcgtccaccaaccaactgcaggaagcggtcttcaagctcttcgccggaggcaacctcgtccaccgtgccggccgcgcacaccatgccgttgttaatcacagccacatgcgtgcacatcttctcgaccagtgtcatcacatgcgaggaaatgataaccgtgccgccggtttgcgcatattcgaccaggatgtctttgaggttggcgctagataccgggtccacggactcgaacggctcatccaacaccagaatgcgtgggctgtgaatcatcgcggaggccaaacagattttcttggtcatgccggccgaataatcggtgaccatagtgttggcggcctgggccaaatcgaaagcattcaggaggtctttcgcgcggcgagtggtctcctcacggctcatgccgcgtagcatgccggagtagatgagcagctgcaggccggtgagacgatcgaatatctgatcgggttgcggcattacgccgatcatgcgtttggcggtgttgacatcgctccacacgtcgtggcccagaatcatggcggtgccagcgtccggcaccaacagaccggtcaccatgttaagcgtggtggtttttccggcaccgttcgggcctacaagcccatagaacgaaccaattgggatgtcgagcgcaagcccgttgactgcgatcttctggtcgaaacgtttaaataggccacgaatcgacaccgcggcagtcggattcggcggccatgcctgcggttgtggctgttgcggcatcatcggcggctgagcaggtgcgtctccaggcctcatcgcagattgaaattcggcattcccctggatattgtctaagttcatacacccactctactccttcagcagagcaaagcccccagtaaatcgatattttgccctattgacgaaccttcaatgaaacaaaaccacaagtcaatcaagcttttgctccgctgacaaactttcagtgaggtaattctgcgagccacccaagattttgccccgctgacagcctcccagcgaagcaaaatctccagtcaatcgatgtcttgccccactgacgagccctcaacgaagcaaaaccacgggttactagtcgaatcaccccgctgacggcctcccagcgaagcatattgccgaataactcgatgttttgccccgctgagacccaactagcgaagcaaaatctccagttagtcgacgccttgtcccactaacaagccctcaacaaaacaaaaccttgggcaattggttgatttgctccgctggaactcatcagcctttatgcgcgatgggcttccactggaccttggcgaagatggcctggaatgaaatcggcacatagctcaacatgtaaatagggaagctcaacacgtaggcgagcaactccttgttggaggcaccaatctgatcgcgctcaacgatgatggtcaaggcggccagcgccatcagaccaagcaccgacgtgacgataccgttcgaccagccaagcaacgattgcagctggctcggccagctcacaaagccaaaggcggcaaacagcacacccataatgacgcgaatcacacccagcacggtgaacgggcacaacatcaaagtgaaatcaatgcaggagaaatcgcgttctcgcaccgctcgcttgagcagggccggaccgtaatagcggaacacctgcaggaatcccttactccaacgcagtcgttgacgccagctctgcgcaaaggtgacaggctgctcgtcgtacagaattgcgttgccgcagtagccgatacggtcgccatgcagaatcgaatccatggtgaattcgagatcctcagtaagcagatggaacttccatccacgattgcgcttcatcacgtcacgggagaacatgaatccggtaccgcccacgtggcaagaggatcccagaatcatgcgcgagttggacaggaatcgcgattcacggatgaaccacagcgccgagccagaggaaacccagttatcagccaaattcaccgagttgcggtagctggtcagaatcctgaagcccgagcagaacgccttgttcatttcctcgaagtaatgcttgtcgagcttgttgtcggcatcgaacacaaagtaggcctcatagtcatctgccgcgccggtatcgagcatatggttcagcagataggtcaacgcatatcccttgccaaccagctcaaggttatgccgctcaatcacatggcatccacgggcacgcaccacttcagcggtgttgtcggtgcagttatccgccaccaaccagatatcaatgaggccggtgggataggtctgcgcctgaatcgagtcgatgagattgccgatgacgttctcctcgttgcgcgcggagatcagcacggcataacggttggtcatgggcgcgtcggggaaacgcacgggcttggcaaacagggacatcacaatgcacagtccctgatacaccatgcccgctccaccgacgatcaccaataggatgtcgagcacagtaagcaatgtcatcagcgccaccccgctctcgggttgtccgatacggacgtattgtctgacgatgattcaggttgtacagcatcggacgcggctgcctcatcaccagtggaagtgtgacgctgaggaatggcggaggtatccggctcatcgtcatcatcttccgcagcggtaccgcgcaatcccttgcgggcattggccgaaagcacacgcttcgggatagccaccgtggcggaatcttcgccatcgtcttcacttcccccgtgctccggaatcgcgtagatctgctcctgcagcaaacgcagctcctcgctcatcggcacccgactcgtcgaccccttggcagcacgcggcatatgctcgcccagtggctgcagcacatgctcgccgaaggcctcagatgcctcgacgatcttggacttcttctccggttcgggatcattcatcaatggcgaatcaatcaggtcataccgcttggtgtaggcgcggaagatggcctgcagggaggcggtgaccggcaaggccaggaaagcaccgaacgcaccaaacagcgaaccgaaggccagcactgcgaggaaggcgaccgcggcattgatatccatggtgcgctgggaaattctcggagaaagaatcaggttctcaatctgctggtagacgatgatgaacaccagcacagccacagcatatgcccagccgcgatcaccccaagcgaacagcaccggcagcgcaccgccgatataggtgccgactgtggggatgaactgggagaccacaccgcagaagagcgccagaggcagccaatagggcacatgcagaatctccaggaaaattgcggtgcacgtggcattgataagcgccaggatggagcgggaaaacaggaaggatgaaatctggccttgggccacagtccacaccagcaagaatcggcgctgcgtgctgggagccagccattggcagaaggaacggcgcagcttggggccggcggcggaaatgtagtacgtggtcatcaccacggtcatgagattcagcaagaaggagaacaggccacccacagtgctcatggcggtaccggcaaagtcggtaacccacgaagtctgaatgttgttgacaatctcagtgccaagattgttgatttccggcatcttaaacgtggcgtactgatcgacgaactcacgtatctgctcgtacatgcccggcagacctttgaacatggcgatcatctgctgcacgaacatgttgccgaacaaggtgaacagaacgctcaccaccacggccacacccaccaggctgaccatcgaggccacgccgcgtttccagccatgggccaccagcgccacaaccaacggttcgatggcgagcgccacgaacagcgagatgatgatgtccagcaccagataggagatgtcgccccatgagcgccagcagaacatgaacacgatgatggcgatggccacatagagcaacgcacgaccgaaccattccggaggccggcgcggatcgcccctagaggggaacaaggtaccaaaatcgatacggttctcgtcttcaggactagctgcggtttcggcagtgcctacattatctgtgtttcgcgcgctttcgctcatggctctccattgtagcgagtgggtttgaagctcgagtcatccctgcggagtacacccgctttcctattgttgggaatatgctcaacgtttcgattatcatccccgcgtggaacgagtccgaacgcatcctcgattgtctgttgaacgccacacgccagacttttatgccatatgaggtactggtggtggataaccgatcaacggatgacacctgcgcaatcgtggagcggttcattgccgaacatcccgaggcgccggtcaaactgctgcaccagaacgacgagcaagggctgattcccacccgcaatttcggcctgaacgccgccaccggcgatgtgctgggacgctttgacgccgattgcatgattcgccccgattgggttgaggtggtttccgggattttcaccgaggatcccggggccatgggcgccaccggaccggtgatgtattacgatatgccctcacgccacttcggcctgaggagcgacaattccctgcgcaaacgcatgtacaaagccgacggcggccagccgctgctgttcggctcgaatatggctttgcgcgcttccgcttggtatcagatcgccaacgaggtgtgccgggacaaagccgacgtgatgcatgaggatatcgatatttcgctgcatttgctgggcaaggatttgaaaaccgtatattcgccgcgcatgattgccgcgatgagcgctcgacgcatggatacgtcgctcagttcgttcctgaactatatgcgtcgattcaagaacacgttcgatgcgcatccacagcattggcgcaagcataagccggaaattctcttcaccgccatgtatccagcaatgcatctgttctatccggtatggcagaaagtgctggacactgcagacatcaatccggctgaggcagcgtggatcaacgagcagatggaactggccgagaccgaaggcaagcagctctacgccgagacgcctactgacgaggtctatgacgagcgccacgagaaataagtgggcatatagcgttgccctcgctggcggagctgttagcaaagctgactgggggtggctacgggaataccgcaaccacccccagtacgtctccgacggacagccccgccagcgggggcaacgctattgagcagatcacatcagcgaggtgtagatcttcaggatgtcctcttcggtggcctgacgcgggttgcccggtgtgcacacgtcgttgaaggcatcgtgggccagcggagccagatcggcctcggtggcaccgacctcggagatcgtggtcgggttcttcagatccacggtgagcttgtggacggcctgcacggcctcctcacgcaccttctccagatcgccggtgtaggcatcctcaacgccgaaggcatcggcgatgtcacggtacttctcaccagtgaagtccttgttgtattccatgaccggagccagcagaataccgttggccacaccgtgggccacgcccagacgaccgcccagcgggtgggccatgccgtgcaccagaccgaggccgacgttggagtaagccataccggtgatgtaggaggcgtaggccatctgctcgccggccgggatatcgccatcggcggacttggccaggttcttggcaatcatgcggatggtctgcatggacaggcagtcagacaggctccaagcacccggggtgatgtagccctcgatggcgtgggtcagggcatccagaccggtggccaccttcaggccgcgcggcatggagtcggtcagatccgggtccacaaaagcgacaatcgggatgtcatgcgggtcgacggccacgaacttacgcttgttggcggtatcggtgaccacatagttgatggtggtctcggaggcggtgccagcggtggtgggcacgccgaagatcgggacggacgggttcttggtgtcggccacgccctcgagggagagcacgtcggcgaactccgggttggcggtgatgatgccgatgcccttgcaggtatcctgcggggaaccgccgcccagaccaatcaggaagtcggcgccggattcggcgaacttggccacgccatccttgatgcactcgaccggcgggttcggcttgacgttggagaacacctcatagggcaggccggcctcgtccaaaaccttggtgaccttctccgccgtgcctgtctccagaagcaccgggtcggtgacgatgaacgccttcgtgaagccatgctgcttggcaacagccggaatctccttgatggcgccgcgaccgaagtatgcagtctggttgaaaatcatgcgatagaccataagtgctctccttttgagctcgttcattaaccgatgagtcactctgtcattgagcggttcaacggttctccagtgtactccgaatgttaacgttaacctgaaaacacgctgaaaaaacaacgctgaaaataatgtcaagaacggcgaaattccgcgcttattgagattctgtctcaataagtcgcagcgataagaaacgagggagtccggcatacggggcgcacctgaccaattccatcagccgaacgcgaacggggtcatcagatgactcgctcaccgttttctacttttagaagaggactaagatacgtcgcagttggggtgatcacaggtagtggaatgaggtagataatggcaaacggcaaggctatgacggtcggcgagatggcatccctatttctcgatcccgccacccctgttcgcatcgacgctttcgatggctctcatttcggaccggcagacgccgatctgaaagtcaacgtcgccaccccgaattgcatgtatcagctgctcgctcatccgaacgaaatcggtattgtgcgcgcgtatattctgggcgattttgacgtggaaggcatcgactatgccgatccgtaccctgccatgcgcaagctgatttccctgtccaagtacgtcaagccgctcactcctgcttccatcgcccgcgtatccgcaggaatactcagccatggcttcaagaagccgccggtgccttccaccgagggaccgagcaagttcgcccgcattaagcgcggcctgatgccacataccgaaaaggccgattcggaaaccgtcagcttccattacgacatgtctaacgagttctatgccgacttcctaggtccgtccatgacctacacctgcgcggtgttcgacaacgagcatatgagccttgaagacgcgcaggccaacaagctgcgcctgattctcgacaagctggatctgaagccaggcgaacgactgctcgatatcggctgcggatggggttcgatggtcatcaccgcagcccgccgcggcatcaaggcgctgggcgtcacgctgtccaaggaacaggccgcatacgccaacgagtggatcgcccgtgagggattgcaggatctggctgaggtacgcgtgcaggattatcgcgaggtgcctgagcatgacttcgatggcatctgctcaatcggcatgatggaacacgtgggcgtcaagaactaccaaagctacttcgaggagatgttccgcctgctgaagccgatgggccgcttggtgaaccaccagatcaccatcagccatgacaagccacacggcaagcccggcaccgacgaattcctcgatcgctacatcttcccggatggcgacctcggcgcgcccggcttcatcgaatcatgcattcatgacgccggtttcaacgtggtgcaccaggagaacctgcgccagcattacgcgctcaccctgcatcactggaaccagaatctctccgagcactgggatgacgcggtcaagcaggtcggattcgagcgcgccaaggtgtggggcatgtatatggccgcctgcgccctgaacttcgagctcgacggcattcaaattcaccagttcctggccgccaagccagaccgtgtgggccacccggacggcaagtggtatccgttgcgccaatggtggcaggcctgacacccctcgcaacaacgaaaagccccgcattatgcggggcttttctgtggtggctccgagcggcatcgatccgctgacctagcgattttcagtcgctcgctctaccaactgagctacagagccagtgaacagtcgaaagcccggacaaaaccgggcttcataaccattccagcgaccccggccggacttgaaccggtgacctccgccgtgacagggcggcgctctaaccaactgagctacggggccatgttgtttctgccatgcgacagacaacagatgtatatcttatatgaaattagcaacctcgcaaaccacggcgtgtttcgcgatattgcagcatttccggcacttggcatattcgttgtgaatacctgtaatttcgcgactcgcactgaccggcaccgccgattgcagatatcctctaggtaactggcttgctatggtgagtgatgcaacatatcagcgacccaaatgaatagcaacaccatgagcgagacgcgcaacgttactccaggcagctccaaccattccgaggaacatatgacagacccgatgactacccccacgactgccggcgtggctcacgccaccaccgctaatgcgagcgccacgcatccacacccattgcacaaagtgctctccttcgtgcgacgctccggaaggcttgacgaccgcctgcagcgcgcatgggacaactatgccgacacgtatctgctcgatatcaccactggcaatctgctggacgtacgcgaaggcgtgacgctcaaccgcaatttcgtcgcacagcattggggcaacgacaacccgctcattgtggaaatcggcaccggccagggcgagaatgtggtcgccgcagcggcggcccaccccgaaacgaacttcctggcgctcgaagtttacgaccccggcgtggcccacacgttgctgctggcgggcaagcaagggctgcccaacatccgagtggcacaggtcaacgcgcctgaactgtttaaggtcaccgagcccggcactgtggctgaggtatggacgttcttccccgatccgtggcccaagaagaagcaccataaacgccgtatcgttcaggttggcatgtcggacgacatccaccgcgcactggtcgaaaacgggctgtggcgcatcgccaccgatatcgaggattacgccttgcatgtgcacgaggtgatggatcatcttgatggctggactaacttgggaggcgtcaccgtcagtcttcctgtggagcacgtgggcaagggcaacgcagacatggccgccgatatgccgcacgctgacttcaaggaatccgaacggttcgagggccgtgtgctcaccaacttcgagaagaagggactggcagccggccgagcgattcacgatttcacgtatcaggcagtaccggtctcccgataagcgggcatctgcggcacgtccgacacacgggcgtgtcgcggatttgcataaaaccgattccttcattaaagtagctcaagttgttcgcccccatcgtctaacggttaggacaccagactttcaatctgacaacgagagttcgactctctctgggggtactgcatagaagagccttggaaacgttgagattccaaggctcttcgcatattcatcgtgctagacgccaccgttttgcaaggtttttgcaaggcgttctactcattgctatcgccttcggtgtccaatgcctcgccgcattcgtccagatcggagtcgtacaggtcggcgtatgtctccatcgtctgcgcgaacgtatggtgtccggctatccgctgcactagtttcgggttgacaccggcatggatagccagactcaccgccgtatgccgtagatcatgcggggtcatgtagtcgggtacgccctcggtcttctcgacggacacggtgagccagccggtgcgactgtcgggatgacgcatgtagtcgtccttggtcaggttggctggattggctacaatgcattagacagtccgatgagggacgaacgacatgagatctgaggccgacgatggccggcccgaaacatccccggataccggagcccgaaggaattcaccgaacaaggactcgtcctctaagaaactgtccaacacaccgctgccaatccatcgtcgcccgcaggttcaggcacggaaacaacgccgccggccgccactccggcacgatgcaacccgtcgatgccgaggacgccgacgcggatgccgtcgaaaccgcggagccggttcccagcggacaatccgcggtctgaccgaagcgacagggaccgctctccgccgcgatgattcttccggccggacgacaatccgaccgggaccccgacggctctcttccttcttctctccccgtcgggcatggcagcggccctgcgccaacggttcaaaccgttaacgcagggccgttccctcgctgctcggactctttactgcttgtcggtttcctcggaggcgagtcgttcttcgagctgttcgacgatgtggtcgtgcatgttctcgtcgatcttgacggccaggaggaagacgacgaggctggcgacgataccggcgagcggcaggtagtaggcgcaggtcttgaacgtgcgaatgttcgcggcggtcatgtcggcggcggtggtgttgccgaccattccggcggcgacgaccacgaagcccacgatgccgttggacagggcgccggcgatcttgtcgagcatcgggcgcacggagagggtgacggcctcgttgcgcttgccggtcttgagctggccgtattcgatggagtcggtcatgctcaggatggcggtcatctggatggtctgcgcgggaaggtagaagaggacgagcgcgacgatgacgacgggcaggttcatgggcgcgatgatgaacagcgtgtagccggcgatcatgagcgccatgccggcggtgtacagccagcggcgcgggatgcggcggttgagcaccgggtagaggggcgtggtgaccagtccggtgatgaccgggatgacgccggcgatggagaagctgtccggggcgccgagcacgtatttgaactggtagaagagcacgccggtggtggcgacgttggccacggagtacagcaagtagctgagggcgacccacaggagctggtcgttctgggcaatggccttgaacgcctcgatggggttgccgttggcctcggccttggcgcgcagctcgccctggttctctcgggtgccgaacgcgacgctccacgcggtgagcaagccgagcacggcaatgatgatggcgaacgccgcccagccggtgcggccctgctcccactggccggtgaacttccaggtgaaccagctgacgacgggcacgacgatgacggtgacgccgttgtagccgatggatccggtgaacgcgccgagcgcggtgtacgtgctgcgctcgtgcgagtcggaggagatcgcggggatcatgccccagtacgagatgtcgcgcagcgagtagatcacgtcgagcaggatgaacacgatgacgaacaggaccatgaacacgccggtgttcacgtccacgaggccgaacaggccggtgaacaccatgatcagcaggatgccgggcacgatgccgccgatgaactgccagggacggaaccggccccatcgggtgttcgtgttgtccacgaggttgccgagcagcgggtcgaggaagatctccgcgatgcggatgaccactatgagtccggtgatcaccgcgatgaggcgcttggccagcgtcttgtccacatcgatgaacagcgcggtggtcacgaatgtgatgaagaacgtgctcatcgtgttgtagaacgcggcctggcccaggttgccgaatgcgtatgcgatcttctgccccatgtttcctgaaggcgtggcatgcggctgttccgacgtcgccatgcgctgtgtggtggatccgctcatggtgtggtggcctccttgcgacctataaagaatccgtacgcgggaaccgctccaatcccgcaaaacttcagtatagaactttcttgaaaaagtaaaaaaatttaccgcgtgtcgcaaatcatgccaacgttttgcaaccagcactccgtatggatgagtaaggtttgaagcttgcttgatgtgcttgggtcttaagaaatccacgtattttgcatgttgtaggccttatgccgcgagatgctggaaaaaatttgcgcaatcaagtaaaaatatttatccttattatataaggaacccgattcaacgaggttccctcactgcggcggcaacgacgcgacgcaatccgatgcgaaagcgaggacatcatgaacacaaccgacgatcagctgaagaacggcgatccgatcgtctcaccgtccatgccgacaacggcatggctcacggacccgcgcgtgtacgcggtccaccggctcgacgcccattccgatcatgcgtgctggtcgcacgcccccgtcaacggcgagggttctgatctcgggcagagccttgacggcgaatggcgggtccgcgtcgagacggcgccgacgggccgtttccccgatgggacgagcgacgtgtcgcctctgttcaccgcgtccgacttcgacgattcgtcgttctcccgcgtgcaggtgccctcgcatctggagactgcggggctgcttgccccgcagtacgtgaacgtgcagtacccatgggacggacatgaggacccggaggctccggccatccccgagcacggccatgtggcggtctaccggcgcgagttcgacgcggatggcgaagtcgcccaggccgtgcgcgaggggcgcccggtgacgcttaccttccagggcgcagccacagccatctacgtgtggctcaacggttcgttcgttggctacgccgaggactccttcacgcccagcgagttcgacgtgacggacgcgatcaagatggaaggcaacgtgctggcggtcgcctgctacgagtattcgagcgcgagctggttggaggatcaggacttctggcggctgcacggcctgttccgctccgtcgaactcaacgcgaggccttccgcccatgtcgccgacatccacgccgacaccgattgggaccccgccacatctcgcggatcgctctcgctggacatactagtcgacggcacaccgaacgccgcgacggccgacctcgtgctgcgcgataagaacggcacgaccgtctggcacacctccaccgaagcgacaggaacactgcacgccgaggccgagatcaacgacgcgtcgccatggagcgcggagcgacccgacctgtacaccctgtccgtcgccctgctcgacgcggacggcaggatcctggaaatcgcgcgcacccgcatcggcttccgccgcgtgtccatcgaggacggcatcctcaagctcaacggcaagcgcctcgtgttccgcggcgtcaaccgccacgagtttgactgccggcgcggccgggccatcaccgaagaggacatgctgtgggacatccgcttcatgaagcgccacaacatcaacgcggtgcgcacctcgcactatccgaaccagtcacgctggtacgaactgtgcgacgaatacggcatctacctgatcgacgagaccaacctggaaacccacggcagctggaacagccccggcgacatccccgtgggaacctccgtccccggcgacgacgaagcctggctcggcgcatgcatcgaccggctcgacagcatgatcatgcgcgaccgcaaccatcccagcgtgctcatctggtcgctgggcaacgaatcctatgcgggcgaagtcctcaaggccatgagcgcgcacgcgcaccggcttgatccgggtcgtcccgtccactacgaaggcgtcaactggaaccacgcctacgacgagatcagcgatttcgagagccgtatgtacgccaagccggccgagatccgagactggctcgaacacggcgacgaacgaggcgaggcgagcaagccgttcgtcagctgcgagtacatgcatgccatgggcaactcatgcggcggcctgagcgagttcatcgacctcgaacggtacgagcgctactccggcggattcatctgggactacatcgaccaagggctcgtccagcgtctgcccgacggatgcgaacgcctcagcgtcggcggagactggggcgaccggccgaccgactacgaattcgtgggcaacggcatcgtattcgccgaccgcacccccagccccaaggcgcaggaggtcaagcagctgtattcgccggtcaagctcacccccgacggacacggcgtgaccatcgagaaccgcaacctgttcgccagcaccgacggctatgtattcgccgcacggctcctcgaagacggacgcgagatttggcatgccgactaccgtttcgacgtggccgcaggagatacccaacaccatgacatcgccttcccggacatcgactccgacgagggcacgcgcgaggtcacctatgaggtcgatctcctgctcgcagaggccaccgcgtgggcacccgccggctacgaactcgccttcggacaactcaccgacaccctcaaccccgaaggggacatcaccgggaacgaccaagacgacggccgcgcgacggtcactctcagccgatggaacgccggcatccgccgcgacgacgaggaaatcctcatgtcacgcacccagggaggcatcgtctcctggaagcgcaacgggcgggaaatggtcatccgccgtcccgagatcgtcaccttccgtcctctgaccgacaacgaccgcggcaatcgctccggatacgaccgggccgcatggttcgcggccggccgctacgccgtcgtgaccgatacgagcatcacgcaatccgacgatggcggactcacggccgcataccggtacgaactcgccgacccggatcacacgccggtgtcagtcacctaccgcgtcacgcccggcatgcgcatgcaactgaccgtcgaataccccggcaacgccgcaggagcggccagcctgcccgcattcggcatcgaatgggagctgccaggcgaataccagcacttgcgctactacggtaccggccccgaggagacctatcgcgaccgcaagcagggcggcaagctcggcatctgggacaccacctcagaggcgagcacggcaccgtatctcatggtgcaggaaaccggcagccatgaggacgtccgctggctcgaagccaccgacatccaaggccacggattgcgtatcatccaacgcggcgaccgccacttcacggcgagcctgctgccctggaacacctacacgatcgaagccgcgcggcgccacgaggacctgcccgcgccgcgccacaactatctgcgcctgctcgcggcccagatgggagtcggcggagacgactcctggggagcccccgtccacacggcctaccagctgcccgccgacaggccgctcaccctcgacgtgaacctcgaactcatctgaccggcaacgggcggcggcatgcaccatcatgccgccgcccgtacccgtatatattcatattccccaaacacaacaacgacatcaaccaggtgccgacccactgcatcacgcagggcatcggcacggtgctcaaggcccgccacctcgtgctgctcgcattcggcgcgggcaaggccgcgagccagtgccgtccgtcttcgtcaattcatcatggccgaggggacgaaactggctcgcggcaccagctcggtcgtcagcagaatgtgccgtcgcacccgacgctcatgcttcaacccatcgatcagggtggagaatgccatgcgcgccaactccctttgatcgattgcatatgagctcagcgacggtgacgtgtaccgagcgatcgactggttgttcacgcttaccacggccaactcgtcaggaaccgccacgcgtagcgcgttcaatgcttgcaatgcccccaccgcgagcacatcagccgccacgatcagaccgtcgggcatggtgcctgtcccgcgatggtcagaaaccaattgctccgcgagacgatagccgttctccacggtgaacgtgccggacgaatacaccagcccgtccgtttccaatctcaagtgagtagcccactgacggaacgacagctcgcggatatcctccggataatcatgcgtacccatgatgctgcctacgccgccaagaaacgcgacacgcttgcggcccgtcgcgatcattgcatccagagcgtccagcatcgtctgcgacagatcgggtcgcaccgaatcgaacagatgaggcgccggattcgtgtcgatacacacgccatgaggcagcaccgcgtgcaacgcacgtaaatccgcctcggggaacaccgtggcacccacggtgatgaacccgtcgaactccgatgcgcgctccgtcagctcatgtatggaacggatggatgcgggagggtccaattccatcgattccgcgcactccgcaaggactttccgcagatcagcgaagtacacatcctgtagctcctccccagacggaggcgcatccagcactgcgatcgcagggcggaacacgttgcgataccccagctcttcgcatacacgcagcacacgccgtcgcgtctcctccttgatggagaacgacgagtcgttcagcagacgcgacaccgtgctctgcgacaccccggcccgttccgcgacttccttgagcgtggccatgacatcctccccgcaaactttagtaaagggttttgctacagcataacccgagatttgcaagatgccccgttgcccgctgtctatttagaagtgcaacgcccttgtttgtcggttaattctagcagttcgtcggcgaacgcctcggccggcgtgcggtagccgagcacccacatgggacggttgttggtctcgtccacgatggactgcacgtcggcggccatggacggttcgatgcgggagcgtttgggcaggtagcggcggattacgccgttgcggttcccgtcgtacgggtgtccatcatgtcgttcatgtccatcggtcctttccatgtggtttccatttcggacaccacccgcctgccatgcgcgcaggcgaagcgaccggaggcgtggatcgcgacgatccggtccgtagcggagacggcatgctggttcgccgtcgcagcacaggcacgggagcggcgcagggaacgcagacggagagcatggcatgctggtggtggccgcaaacccctcgtcagattccgcgcggcccaccgccgcgagcatgcgagcggccagacagcacggtcatgcgcgcagcgcatggcccggggccgtgttcccgctccgataataatgaatgcaaaagcaccctaccccggaaggagattggggtagggtgcctatctttgtcgacggaagataccgacgttattcaccgtttggagtattggtcactgaacggtgaagccttgatccttggcataatcctttagagccttctgccagttgtctgcagctgttctgaaggaggttttgccctcgaagaacgatcccatgctgtcgccgtagatggagcgggcgtagggttcgaagggcaggaactcccatttgccggtgacatccttggcggcttgggagaagatctcgttgtatttctgtcctccgaagaactcgttgtcgctgccgtcggtgttcttgagcgtggtcctggtgaggaagtccttctggttgagggtcttggtggtggcggggaagctgccgttggatacgcgggcgtcgatgccttcgtcgttggtggtgacgtattcgacgaactttttggcggcgtcgagtttgccgtcggggatcttcttggcgatggctagtccgctgccgccgtattcgccgttgatgggcgttccgtcgatggtgggcaggagggctacgcggaatttgccggtggcttggggcacgccctgcaggaggttgttggccatccatgcgccgctgatgagactggcgatggagccgccacccagtgacttcatccaatcgtcggtccagctcttcgtgtggacgtcgatgaggtcttcgtcgcgcatcttctgccagaggtccatgaaccgctgggcgcctttgtccttggtgatattgatggtcagtttgtcgtcgttgagtttgtaggcgtggccgcccatagcccacatcatcgcgttgaacaggccaccgtcgccggagtcggaggtgatgtaggagccggtggcgcggatcttcttcgcgtcttcgtagaactcgtcccaggtggccggtggttcgctgatgccggccttgtcgaacacgtccttgtcgtagaagtaggccatggggcccgagtcggcgggcatcgcgtacaggccgccgttgatgttcacggagttccatgtgccgggggtgaatgtgtccttgagcttggcggtgtcgtagaccttgctcaggtccatgagcgtgtccgaatgcacgaactgcgggatggcgaggtattcgatcagggtgacgtcaggcagaccgctgccggcttgggccgcgttgttgagtgcggtgtaggtctcgttgggttggccgacgttgctcaccttcaccgtgatgtccggattggccttcatgaaggatttggcggcgcgattgatgctggtgtcccacgaccataccgtcagttcggtcttgcccgagcttgtggtcgtgttgccgcatcccgcgagagggatgagcagggctccgatggcagccgtggctatgactgcgcgcgtggtgttgttcatgttggtcttctttccgtgcttgaccgtctctggccgtagcaactactttgtttggacgtcgagcataattatgtacagagatgggaaactcgtcaaaacaccagcgttttcatattgtcagtcccctgatgggcgctattctgaaagccgttcgaggatgacgccgggatgtctgtcccgataatgtgattccgcatttccgcaatcgtctcacccgaggatggctcccatgtacgctaaatccaatcccagcgacgcaagggccaacaaccgcagactgttgttccggctgctgttccccgaccggcaactgtcgcgcgccgacctatgcaaggagacggggctctcgcgcgccactgcgacggacgtgaccggcgagatgatcgacgacggcctgctacgtgaactggggtcggggaaacgggatggccgtggcaagccgggcaccttgctggccatcgatacggatgtgcttcgtctgatatgcatcgatctgtcgcacccgtatgtgatgaccggtgccgtgatggatctgcgggccagaatcgtggagcgtcgcgaacgcgtgcttgatgatggcgaccgggtcgatctcgacgatgtgctctcgcttgcgggccagatgatccggcttgccggttcggagcttgtcggcatcggcgtcgcagtccccggcgtggtctccggcgcggggagggtgatctccagttccagtctcggctgggacgacgtggagcttcgcgacatgctcgaaggcgagttctcgctgccggcccgagtggacaacgacgcgaacgccgcgctgctcgccgaccacttcctcgggcacggcaatcccaactgcctgcttgtgcagatcacccggggcatcggcgcgtcggtgctgctgaacgacgggttcgtggatggcgacgaccatgcggccggcgagatcggccatgttgtgatcgacccgaacggtccggcatgcacctgcggcaagcgcggctgcctggagacctacgtctccgccatcgcgttgcgcgaccgcattcgccgggacccgaatcggcgcacggacatcctggccgaagctggtgcgaggctcggcgaagctctggctatgccggtgagcctgctgaatcttcatgacatcgccgtctacggatctcccgacatcgtcggcgagacgctgctcaatgcatgcgacgagaccgtcaactccttgtcgcggaacgactaccagagcggtatgcgggtgcgtcggtgtgagctcggtgacgacgccactctgcgagggcaggcggtctccgtgctgcgcgagatcgtgggcgggcgcgggctgcacgcggcgaccacgcagatggacaagtcctgtcttgaggcggcccagctggacggctgctcaaagctgcgctgctactagcagatcaccgtgccgccgatcaagccgagcctgatagtcatcacgatgctgttggtgatctgggacttcaacgtgttcaaccagatctggctcgtctcccagggaggccctgcgaccacgaatagggcaaccacaaaccacggcgtcgggaccatctccgtacaatggccccgacgccgcacatgccatctcaggaccgaacgaaacccaaaacaatccttagcgtcatcccaagaaaggaacctccatgaacggtcaaacatctctgcaaggatggaccatcatccccatgccgcaaaccatgcagcataaagcggacatcgcattgctgccaatgtgcggacgaatcaacgaagcgcgcgcagtcggtgacgatcggcacatacttgccgtgcagctcatcgacgacatccgcgcagccaccggattggaatgggatatcgccaccggcgaccgctggccgggattcatcaccttgacgacctttgacgagccccatgcacacccgtccggtgcatatacgctcgatgtcaccccggacggcgtgaccgtagcgggagcggacttcgagggtgtgcgcaacggcgtgcagactttacgtcagctcatccgccaatgcggcgccgccctgccctgcctgcacatcgaggaccgacccaccttcgaaacgcgcggctactacctcgacgccacccgcgggcgcgtccccaccctcgactggctcaaacactgggccgacaagctctgcctgtacaaatacaaccagctccagctctacatcgaacacaccttcgcgttcgactcgatgagcgagacctggcgcggttccagcccgctcaccccgcgcgacatcctcgaattcgacgactactgcgccgagcgcggcatcgagctggtcccgtcggtctccacgttcggacacctctacatggccctgcgcacgcaatccctgcgcgacctcggcgagttccccgaaaccgccgacgagccgttcgggttcatcgaccgcatgcaccaccacacattgaacatcggcgacgaccacgccttcgccctgtcgtgccggctcatcgacgactacctgcaactgttccgctccaacaaattcaacatctgcgccgacgagaccttcgacctcggcaagggccggtccaagcccctcgccgaccgcatcggcgtcgcggccatgtacgccgactacgtcacccgcctgtgccgccacctcgaagcccagggcagacggccgatgatgtggggcgacatcgccctcgaacaccccgagatcctcgaccggctccccgaaaccgtcaccctgctcaactggcagtacgaccctcaggtcacggacgagaagatccgcaccgtcgccgaatccggtgccaagcagatcgtatgcccggccgtatggtgctggaacgcgctcctgccgcgcatcgacgacgcctggagcaacatcacccgcatggcccgctacggcaggcaatacggcgcccagggcatgcttgtcaccgactggggcgacttcggccatgtcaacgacccacgcatggccatccccggcatgatcatcggcgcacaggaatcatggaacccgggacgaatcccggatgaggccgacatgctccgccgcatctcccgactcgaataccacgacgccagcggagaactgcttgatatccttgctcgcgcaagccatgcggccagtttcgaatggaaccacctgatcacttggctggaacttgatgacggacaaggcggagtcaacaccggggtcctgcaaaccatcccgggactgctgccggaaaacgaacgaccggacgatgtgatccgttccctccgggacgaaagcaagacaccgtcacttgcggaatcccgacgaatgctgctccgctatctgaaacaccgcatcacgctcggcgaaaccgcagatcaccttctgcaggccagtgcccgtcgaatctccgcgatcaccgcgaccgcaggaccgcggaacgcaggaaacgccgctgcattccgcatagccgtcgaggggcagcgactgctgaaccgggttggcctccggcttgcgtccgagaccgggatcactgacgctttgcagccgaacaccacgtctcaacatgacgatgaggcgaaccttgctgaagcattggagatctggatggaggcgtatgcgacgcaatggagcacggtcagccgagactccgaactccgtcggctgcaagatacggtgtggaagttaacggaccatctgcgcttccaatccgtctgaggctgcgattgtgagacttcgaccaatcagatactgaaatgccgtgagggaccagattcagatccctcacggcatttcccatacgaaggtgtgtcacgtatcgcgagggggcggtgacgttttgttggacttcgttgtctgaatggtcgttcgcaacgatagcacgcacgtccaggcgacgggcatgccgtcgtagcgggcgatgaccggcggcaggtacaccttgcccgccgggatcccggactcggtgatgcccgtgacccacagctcgttcgggttcgcggcgcgggttcgggcgaatccggcgtctggcacaagaccgtcatctgctggctcgtcctggtcgcatacctgtacatccaatgcgagaactatgcgttcgccgctctgccgctcctcgtgttcgctgcctcgaaggtgaggcgcgagcgctgattcctcgcgggccgacgcatcgacgcggcccgcgatggaccaaaatccagaataaccgacattcgccgctgttccgtctttcgcccaaggcgtattctccccgtatcttgaggtgcatcatgtattgtcgcggctaactaaccggcgaaacgcggcatgtttcgcattttgggcgaaaagcccaaggcccacaggaggtattgatgacgttcgttgcacggtcggtgcgctatgtgctcagaaaacgagtgcgaaccatagtgctcctcatagtactgaccatcataacggcgagtatgctatccacgatcgcggtttctcgggcagctcaacaggccgccggacgaatcgagaaggaagcggtcggtggattcgtgctggccagcaacctgcagggcagcatgctcacgcctcgcggaggcggcatggtgcgtcccgccgacgtgcgccggatcgcccaactgcccggggtcgattcgtatatggtccgtcagaacgccaccgccgatctcgtgggggcgaatgtggcgaaggtccccggcggcgatgattacgatgcgaccaaggagcagcagttcggcaacgccgccaacgtcataggcacgaatgattcgtcgaaactcaacgtgttcacgtcgcgcacgctcggcatggccgaaggacgacacctgaaggcctccgacaagtacacgtcgatgatccatgaggatctcgccaaagccaacgggctcaaagtcggagacacgctcacgctcaaggccaacgcctacgacgccgacaacgaatcacattcgacggcgaccgtcaagaccaccatcgtgggcatattcaagggcgacagcgccagaaaggtatccagccgagcggaactcaccgccaacaccatctacaccgatctggataccacacgcgatctgtaccagtacaaggacggcaaggaaatataccaggacgccaccttcgtgctgtccaagggcgttgacgtggagaagaccatggatgccgcgaagaaactcccggtggattggaacaactatcagatcacgcgcaacgaccagtattcgtcgagcatgctgcatgccgcccgcggcgtgcgctcgatgatgcgcggcgccctgatcggcgtgaccgtctcggccgtgctcgtgctcagtctcatgctgctgctgtggatgaacgaccgccgtcaggagatgggcatactggtgtcccttggcgtcggcaaaccctccctggtcgcccaatatctcgccgagatggtgctgatcggtctgccgtccctcgccctcggctggctgtgcgcgcagggaatggcccaatggctcggcaccacggcgctccattccgtgaacgcctccgcggcgaaggagctgagcaacatggggcaggtcggcggcgatcttgaatccagcatgtcggtgcgcaccctggattcgctcacggtgtcggtcgacgggaccgccatgctgtacgtggcgctcggactgttggcggtgatgctggtgtgcgtcgcggtggcgtgcatgccgatgctgcgcaaatcgccgcgagacctgtcggagattcgatgatgagcatgaatgtgtggaagcgtgccacgttggcgatcgtgcgcaagccggtacgcagcggcatcatcggtctgctgatgctgatggtcttcacgagcctggtggcgcaggtcggagtctcgacggccctgcgtaccatgtccgacagcatcggcgcgggcatgggcatagggtttaccgtcagcgccggtgagaatcccatcagcgccgaggaggcgagccggttctcgcgtatccccggtgtgacgaagactgcctatgcgacgaagaccttggcgcaggtggatggcgcgcgtccggtcatgccccggcagggcccccgactggactccgatctggccatgcaggtcagcgtgctgggcaccaccgattcctcattgtccgaggaattccagagtggcctgtaccgcttggagcagggccgccatatctcgggcgacggcgacaatgtgctggtccaccgcgacttcgcgctgcagaacggcctatcggtcggctcgacattccgtctccggcaggaggggcgtaacgccacggtgcgtgtggccgggatcttctccggcaacgtgcaggcccaaagccccctgccctcggacacttccgagaacctcatctattcgggtatgcgagtggcttccgctctgaccggaaacgaccggatcggcatgatccgatgtctgtcggataatccacaggacctgtccgcggctgttggacgggccaagaccatggccggcggcaagtacgacgtcaccgacgattcggcccggctctccggcgtcctgcaatccgtgcagacggtgcgtgatctggtgcgcatggtgctgctgtccgtctgcctcgcggacgtactggtgctggcgatggcgctggtcttctggattcgttcacgcatccatgagataggcacgcttcttgccctcggcatcggcaagatgcggattgtcgcacaactcgccatcgaaaccggactcatggcggcggtcgccgccctgtgttcgctgggcaccggtgctatgctgtcgggatacgtgtcttcccgactgttgcgcgattcgggcgtcgcgccgctggaatcgttgcatgtggaggccttgccgcctgagcagacgatgctcatcctgctgctcggatgcgcggtcatcgccgtggcccttgccgtgtcatgcgccgtcgtgctgtccaaatccccgaaatccattctttcctctatgcgttaggagtcaccaatcatgtctaactgtctgcaactggaccatgtcgattacgcttacggcgcggcgaagatccttgttctttcggatgtcagcgcggatttcgaatccgggaagatgtatgcgatcaccggcccgtccggtgccggcaagagcacgctgctggcgctgctggccggcctggacgccccctcccggggagtggtccgcttcgaaggggaggacatcgccgcatcgggctatgcgaagcaccgtcgggagcacgtgtccctggtgttccaggaccataacctgatcgactatctcacccccgaagagaacctgcggctggtcagcgccaaggccgatatgaagatcctcgaggaactgggtttgagccgtgaggaatccaagcgcaacatcatgcacctgtcgggcggccagcgtcaacgggtggcggtcggccgcgcgctggtcgcgccgggccgcgcgattctcgcggacgagccgacgggcagcctcgacccggagatgaccgacgaggtgattcatctgctgcagcacgccgcccatcagatcggcaaatgcgtgatcgtggtgacgcattccaagcgcgtcgccgactccgccgatgtcgtgctgcgtctcaggaacaagaaactgacccgggcgtgaccagtctgagccgggcggcacccatacaccgcttcggcatttcggcattctggcaccccgcgctccggcaccccggcaccccggcgacccactcgcgttgccggggtgccgtattcgttctgcgccataatgtgcgtgatagtggaaccatgccagtgatgaatgatgaagtgcccagcgtggccggcatagcgagggaaacaaccagcatggcacacgacggcacctgattcacgtcgtcgcatggatcatccgatggccactcggtcacgacacccacacgcaacaccaaccgctggctgccggctctcaaagcggccttcccgctcaccatccccatctgcctgggattcctgtttcttggagcctcctacggcattcttagcggcacaatcgtgtacatgctgctggtgcagctggtgttctgagaactcccctcagtccgctacgcggacagctcccctcagagaggggagccaaaaactcacaattgttgggccacccagtcgacgatatagggcgcgacttcctcgatctggtcaatcgcgacctcgaactcatgctgtccgccgtaccacgggtcgaccaagtcaatctgatcctcacgtccaggcttcggcttgggcaggttcggatcgaagctgcggtacatatgcacttcggcacgcttgccggcaggaagcatgcgcagcagcgagcgcatatgcgaggcggtcatcggcaggaacaagtcggtacgctcgatttcctcgcgggagatgcgatgagcaaaatgatcgcgcgggatctcgtcgccatatccacgctcgcgcagcacgcgcacggcacgcgggtcaatcggatggctccattcctcatcggaaacaccgctggactccacatctacctgatcgcccagtccgcgctcattgaagaagtggcgcaagataatctctcccataggggaacggcagatattgccggtgcaaacggtcattacggtatagggctgagtgtcagtcatcacggtctcattcttaatcggggccatcactggccagtacggattatcacacggtgggtaatatgcagaacctcgtcaggcggccgaaccatcaaccgtcaacgaggtcgctgcatcacttggtcttgcgcaagatgcggaaacggtacgcggcgatgccgggctcatccttcgcgggcgtgagccactcccctgcttcggcttcatgccaaagccctgcttcaaccagcgattcgacatccggagcataggcatcggcatccacagtggcgtcaagatcggtcacataggccttatccgcaaacggcagcgcctcggagaacagctgtgcacctccgatgacccaaatctcagaacgatccagaccgtcatccggaatcgcctcctgacgagccagatcaagcgcatcatcaaggccggtgaccacggtcgcccccggcgcacgatacatcggatcatgggaaatcacaatgttgtcacggttgggcaacggacggtacttcacaccaagcgattcccaggtcttacggcccataatcaccggatgagagacggtcagctccttgaaatgcttcatgtcttcagcacaatgccaaggcataccgccgttgagcccgatggcgccagcgcgaccttccttgtcgcgggcctgagcccaaataagattcaccgagaaagtctttgggaaatcatcgccccagtcttcttcagtggcagacagcccggcagatccgggctcgggttcgtgatagccgctacggctactgtcatgctccatttcgctgtactccttttggattgcggaactgggccttagtgtagtggacagcgcagactcgggccgcgttcacggcccaagttttatgccctgcggacaatgcctggtcagacaatatcagacagcaacaggcgccttgatggtggggtgatgctggtatccgacgatggtgaagtcctcatactggtaatcgaacaaggaatcagccttgcggatttcaatggtcgggtaagggtacgggtctcggctcagctgctccaggaactggtcgacatggttgtcgtagacgtggcagtcaccaccggtccagacgaattcgccaggttcaagaccagcctgctgggccatcatcatggtcagcaacgagtaggaagcgatattgaacggcacgccaaggaacatgtcacaggaacgctggtacagctggcaggagagcttgccattggccacgtagaactggaacagcgcatggcagggaggcaacgccatcttctccacctcggccgggttccacgcggagacgaccatacggcgggaatcgggatgattcttgatcagatcaagcacattggaaatctggtcgatggtgcggttcggatcctcaggagtgggagccggccaggaacgccactgcacgccgtagaccgggcccaaatcgccgttctcatccgcccattcatcccagatgtggacgttatgctccagcagccaattgatattcgaagagcccttgaggaaccacagcagctcgtaggccagccctttgaagaacaccgttttggtggtcagcagtgggaaatactgggacaagtcgaaacgcatttgctgcccgaacagggaaatcgtaccggttccggtgcgatcggacttcaacgtgccttcggtcagaatcttgcgcaccagatcctcatacggcatgggaatgtcggtttgggggcgcgcaggaatacgggtgcggatatctgcaagttgttcttcggtcaaagccatacgcaccagtgtagcttagaggcataatagagacgtccacataaacgggagcaccggtcatgaaccgtgcttccccgccggtatcggtcgatagagccagttcgccgacggatgaaatgaaagaggatagccatgggtaagcgactgtgggttgagcgcaacaaggacggttcatgggatgcgttcagcgatgacggcgcgcacatcaagttcggcaaggatcgcggccagttcacgccgggtgatctgatgaaggtcgcgctggctggttgcgcggcactgtccagccagttcgccatcgaacacacgctgggtgaaggcaagggcgccaagattgtggtggatggcacctatgacgccgacggcgacgcctacaccggctttgacgagcaagtggtgatcgatgcttccgacgcaggcttgagcgatgaggacgccgacaagctcaaggagcgtgtcacccgtcacatcgacaagggctgcacggtcaagcacacctacgtgcaggaaaccccggtgcgcatgagcgtcaccgtcaagcactgagatttacttggctcccctctctgaggctgagccgtgaagcagacagcccagtgagctgtctgtaggcgaagcctgagagagacggcagtcgaacgaaggcagaaaaaacgaagaggctcccattgggagcctctttccgtattgagacttactgccgatcaggatcgatggtttcctcgatcttctgggcaacctcaggctcggccttggtcaccggaatctcctcgacgccggcaatctcctccagcgacttggtaggtacctcagcgggcgagctcggcacagtatcgagacgagactccgcagcctccacatacttgcgtggcaccacatacaccggtccagcggcatgctgcagcagtccctggctggtggagcccagcagcagaccggtgaagccaccgcgcccacgagagcctacaaccactacatcatggtcgaagctggccttggtcagcgcactgacggccgggccggagacgatctgcttattgatcttcaggtcaggatgggcctcctgcaggggcttgatacgcacctcaaggtcttccttgtaggattccatgactgcgtcttcaccgtcgacccccttcaggttcggcacagcggacatcacatccagctcggcaccccagacggccgcgaagtcggcggcgatctccagagccttcagaccccacttggattcgtcggaaccgacagccaccttggtgatagtgttgttcaagtgcatcaggttaccgtcatcatcggtgtacggcaccaccacaatcgggcagtatgcatatgccggcagcgacgaagacgtggtgcccagcagacgctcagccaagcctcccttgccgcggttgccgataacgatgaggttgtagttgcgcgatagttcgacgaacaccgaagcgggatcgcccgtgacgattagtgtggcagcttccacaccctgctcatctgcgatggccttggccttggacagaatctcctgagcatcggaatgcgcggcgttgtcatcccccatcgccgtatatgtggcatcgaacgatacagcagcatagctcggcagggaatacgcgcagacaatctgcaacgtgagtccggcatgcttggcataattcgcggcccaccatgttgccttatagctggcatgcgacccgtcaacaccgacgagaatggccttgtcgttaatcatgacgacctccttgaagttattgcgatatgtaatatcgcgtactttcaacaataccccgcgacactcggatttgctggcaaactcagccgaaaaagaacaacacggaattttgctggacatgtctcgctttgccgtggaatacttctccccactccatacagcgctggtaaaaacgcaaaaagcgcgccccgagggacgcgcttcataagagcaatgcgagctacagcacgcggcgaatggaatatccgccggagaacacggaagtgctggtcacctgcgttcccaagccaggagacagtgcgttcatgaccagaccattgccgatatagatagctgcatgagtgccattggcaacgatatcgcctggctgcgcttgtgcgagactaccgacagcagtgcccacaccggcttgtgcgccggaggagtgcggcagggagatgccgaattgcgcgtatacgtactgcacaaagccggagcaatcccaaccagagggagtgttgccgccatacacatagggatagccgctgaattgggaagcaaagcgggccacatcagcaccggaaccagtggcgctgcctaaatcaacctgaggaatcgcggcacgttgtgccgaacggctcgcggcctgggtctgcgatgcctgggcctgagcggcggcctgctcttcggcggccttacgagctgcggcatccttttcagcctgagactgcgtctgcggcacatcaaggctttccacatcaccccaactggaattgtcatcagtggaggtggcagtcgattcggcaagagtgttcttcttgaccgtcgtcactttcgggaaagagcgagaagacaccacagcagtgcccatatcggcagcgttgaccgtcggcgtcacacaggcgaacattgcggcagcggccgcaatcgtcaccaatgtagaagcaatgtatttagcattcatcatcaacacggaactgtaacatacccgggacaatcttcaccagtcgagcacagcatcaaccgactggtttcataggcaacacgccgaagcatcaatcagcactataacgcaatcgactccgacgctgacgcaatcggagtcgatgtataaagcctttggcgcttacggaatgcgcaccaccatggtcaggcgattaggcaacgtgccggcaagcgccacaacgccgccggtccaaccaccgtgaatggctttgccgcctcccacataaagaccaacatgatcatagtgagcgccgccattggtaccgttggtgtacttgtaaatcaggatatcgcccggctgcagcgaaccatcggtcaccacatagccaccgggaacattggcatactgttccggccatccatggaagctgataccacgggcagccagcgcggcagacaccagagcggtgcagtccatcgcactgccgatcaaggagtacgcacgatcaacggatgccgcagcaccagcggaaacaccggcaccggtatcggcatagctcaacgaagtacgagcctggctacggctggctgcagcggattgagcctgagccgcttgagcggcgtcctgctccttagcggcctgctcttcggcggccttacgagctgcggcttctttttcggccggagactgcgtctgtggcacattcaagctttccacatcaccccagctggaattgtcatcagtggaggtggaagtagcttcggcggtcaggttacgacgaacctgcgagtaggacgggaacgacttcgtagaggtcactgtgccttcatcggcggaggctgcgggaacaacagcaaacagacatgccaccgccacacaggacgcgaaaacagaagaaagtgctgattttgccttcataaatccttcaccttacaccgtgccggttaatggcccaaaatgcgatgccgtctgctcccattgggaacattggatttcttcggcgtgccgaatgcgccagatcagtaatgaatgtactgcagcgagccagcctcagcagcagtgaacgaacgcgaggagataacacccaaacccttcacattggattcggatatctcgatggaaccatcggcgttgatcttctcgaccacggcgacatgcccatagtaggaatcagcgccttgctgaccgggctggaacaccacgacgtcgcccacatggcgaggcgtgctgtccacccagtagcccagcgcgctggcgctggaggcccactgaccaccgttaccgaagctgccaccaaccggcagacccagctcggtgcggcgctgataggcgtaccacgtgcactgaccccacgggtaagtgtttgacgcgctcctgcctacagcatggttcggattgaaaccagcaggcagcaccgactgatccccgtccatccacgcggcaaccaccgggttgttggcggtgttgtggttcatcaagtcggtattcaacgagctgtccgagttgctcaggccccagccgccctcgttggaggactgcgtggcattggccgcggattcattcaaatcggtacgggcctcggaacgggaagcggagctcacatcggtgacgcgcttaatctgcgtagtcgtagtggccgcatcggcaagcaccggggaattctcttcagtgttggcaaaagccattgcagtggcggcagtgccggccaaagctgccagagaggcagaagcaagaatatggctgcgacgttcagccgcgcgggcggcctgacgaatagaacgacgggtctgcggagcgatttcgttaatcttctcagctaccgcgggatcaagacccagcacggcggcatcgctgccggcagcctgcatggcacgaacggcgcgagcacgatgggaccctttaccggaggcaaaaagtaccttcgctaagctgaactgctggcgcgagaccttggccgctttgtgcgaagcatgcttcatactgtaaaaactccttggatgggctcacgggcacctgatatgggcgtcaccgttccgtcacaatttgctactgtacaacgaactggggccaatgcccaaacgcatagcctacgcttcgggtgcgtcaaacgttttacttcgtgtcctgaaatcaccggaaaagtgcttcattccaactgtttaccgcctattgttcatccgattatcggaaaagttatgacacagctcccccactctggctacccttggaatcatgacagtgaacattcccgcatcgcttaaacccagtgacggccgtttcggctctggccccagcaagattcgcacggagcaaatcgccgcgctcggcgccggcgccaccacgctgctcggtacttcgcatcgccagactccagtcaagcaattggtcggctcgattcgcgaagggctcaccgaattcttccacctgccggaaggctatgaaatcgccttgggcaatggtggtgccagtgcgttctgggaaatcgcctgcgcatcgttgattacccgccgcgccgcattcggcacgtacggctcgttcagtgcgaagttcgccgcctccgcagccaacgcaccattccttgaggatccggtgttgttcgccggcaagcccggtacctatcgtctgcctgaactcaccgagggcgtggacacctactgctgggcccacaatgagacctccaccggcgtcgcagcaccgattcgccgtgtaccagggagtctggaatccggcgcattgactgttatcgacggcacaagtgcggcaggcgccctgccggtggatatcagccagaccgacgtctattacttctccccgcagaaggccttcggatccgacggcggcctgtgggtggccgcgctctctcccgccgccatcgaccgtgcggcaggtgttgagtccagcgcacacctcgaaggcgcacgccgctgggtgcctccgttcctctcattgaccagcgcactcaacaattcccgcaaggatcagacgctgaacacgccggccgtggccacactcatcatgatggagaatcaggtgcgctggctgaacaacaacggcgggctcgactgggccaccgctcgttgcgccaagtccgcttccattctgtactcctgggccgagcgttccgactatgcacagccgttcgtctccgatccggaagcacgctcgagcgcagtggccactattgatctggacgagcaggttccggcaagtcaggtgcttgccattctgcgagagaacggcatcgtcgactgcgccggataccgcaagctggggcgcaaccagctgcgtgtcggcgtgttcccgtctgtggaaccgtctgacgtcactgctctgaccgcatgcattgactatgtggtcgagcatatgtagcgcaatcgtatccagcgattcatcgacgtacaggagaggggcatgtatagcccctctcatttttttgacgttcctgtttactattgtcgttgagtatgaagttcgcgcccattatcgacccagccgtccgcaaacccgcacccaaacccgtgcgagtggatttgcgtaaggcatttggcatgggtacgggcctgtgggctgtggcgctggtcatcgccctgattctactggcgtttaatcacagcacccttccgctggtcatcatgtgcgctgctggcgtgattatcggcgtgctgctgctgatttgggaacacttcgaccgctgggactaccgccgtctcggtcaatgatcattgggccaacggcagtgtcagactgaacgtgctgccctgtcccggcgcactccatacggatacgtcaccgtgatgcgtcagcgccacatgcttgacaatggccagacccaagccaacgccatccgcagtacgttcgctctgcgaggagccacgatagaaccgctcgaagatacgagcttggtctttcttggcaatgcccacgccttggtcgatgactcggattaccgcctgctctccatccttggatttgaccgcggacacactcaccgtgccattcgccggagagtatccgatggcgttttccataagcttggtcacggcactgtcgatctggtcggtctcgccgttgatcaccaagtcttcatcgccggcgacattgagctggactttggactgggcagccagaggttcgagacgttcggccacttgccgcaattgtcccatcacattcagtcggttggccgaagacggcgtaataggctcctgcgcacggatcagcagcagcaaatcagataccatgtggttgagcttgctgcagctggatttcacctgccgcgcatcgtccatcacctgtcgctcatcaaggtttcctgcctccaaagaatcagcaagcttggccagggcatcagtggggctgagcaactgttcagacacgttcgtaatgaatgaatcacgcacctgggagaaccgaatcgcctcacttacatcggcaatcaacaccacgatgaaatgctcattgatgcgccccacagtaactttcagccagttcggtcgatgcaccgatcgtgtctctacatgattgattctgttctcggcgctgtcgtaccgttcgggagtggcggtggtcaaatcgaactgacgtttgccgccggtctgccgcacctcatgcacggcatttaatacctcttgctccgcaatggcatcgtccgagaccacacccaatcggtaggcggacggagagcaacgcaccacatcatcattgtcatcaatcactatggatgtggtcggcagcatggagagcaaggccgcggtatcgtcgcacaggtcgtcatcctcgtcatcgtcgatgagtggggaatccaaggaaatgcgatgcgtcacgaatcccaccaccagtacaacgactagtaccagcaacacaacggccgcaacaatgagggcagccacaacaggaaacggcatcgatgtcatactttcattgttccacacgtgcggcggcattcacgtgcgaccggcacgccgataacatgaatttcgggtgaacaacccaatgaacagtagaacaacttgaggttgccattatctacattgaagtaggaacggaatgctggaataatacactggtacaggttgcacaacgagaagcatgaaaggctggagaaatgcgcgttatttttaacgaggagctgaagcaggttgccgatgacctcgaccgcatggcgcaagatgtgcgcaaagcgatcaaaggagctggggatgctctgctgaatcaggacgttgaagccgctcaaaccgtgattgatggcgacatcgaaatcgatgctttggagtcctccgttctcgaccagtgcgtgaagctgctcgccaagcagaatccggtggccaccgatctgcgcgtggtggtttccaccatgcgtctggcctccacattcgagcgtatgggcgatttggcccgtcacgtggccgaagccgcacgccgcacgtacccggctgccgcaatcccggaatccgctcagccggtatttgccgacatggtcgcgttcctggacaacaccgccaatcagctggtggccatgctcaccgaccgcgatgccaagaccgctgaggccatcattctggccgatgacaagttggacgagctgcatcaccggaccttcgacctggcgctgtccgacgagatcactcgtcagcagaccgtagacatcgtgctgctgggccgcttcctggagcgcctcggcgatcacgccgtgtccgccgcccgccgtgtggtctacatcgtctccggcttcgaccccaccaaggagccgacccgcgacgaaggcaccgacatcgactgataattgaacacttatcctcctgtggcttgaggaggatgcccgaaaagcggcgatccggctacggctggacgccgtttttttgttgcttttaggcggtacaccggcatatccaccacgtagcaaatgtctcaccacgtagtgaatctcccaccacgatgtcagccgaattttgcatttcgcggaattccgccgttttgggacaccacgtggtgggcatttcacaacgtcgtgggtatttcacctcgcggtggggagttcgcttcgtggtggagcggcacaaaccgtttgaaacttgtttcggcatagcaaaagggagtcgcacgataattgtgcgactcccctaatgcttaccgtattagcggcttaggctcacttctggccctgagcagcgacagcggcggcaccggcggcggcagcctccgggtccagatactcaccacgcggcttgatcggcttgaagttctcgtccagctcgtagagcagcgggatagcggtcgggatgttgaccttggcgatctcatcctcggacaggttgtccagcatcttgacgatggcacgcaggctgttgccgtgagcagcaatcagcacggtcttaccagcgcgcagctccggctcgatggcggactcgaagtacggcttcacacgctcaacaacgttggccaggcactcggcttccggaaccggatcgccggcgtaacgcgggtcgttattctgggcgtactggtcgttcgggtcgatctcgggcggcggagtggcgtaggaacggcgccacagcatgaacttctcgtcaccgtactcttcgcgaatctcggtcttgttcttaccctgcagagcgccgtagtgacgctcgttgagacgccaatcacgctgaaccggaatccacaggcgatctgcggcatccagagcgatgttggcggtgttgatggcgcgacgcagcagggaggtgaacacgatgtccggaaggacgttcttctccttgagcagctcgccgccacgcttggcttcggcttcaccctgctcggtcagcggtacgtcgacccagccggtgaactggttggttttattccatgcgctctgtccatgacggagcagtactaatttataagtcatacggttcagtctacagccgtatgccgccaaacacgagtatccgtcttagatatttcatctcaattaggtcacaacgccacgttccttttcccggctcccttcccaaggggagctgtcagcgtagctgactgagggaattacagcgctacggaaagtgcaagcaccactgcgaacagcagcgtctggaagctggcagcacccaaagcggggccaaatgcatgcttcttgacgctggaaatcatgcgcaccggcacacccgctccagagagcagcagcaccacaccccacggccaccataatgtgccgcacatcagtagggcaataatccatgcaataacacagcacacaatcagcaacgtgcgtgcaccggactcccccatatgcacggccagtgtacgtttgttatgttcgcggtcttcgtcgatatcacgtaggttgttcaccatcagtatgtggcaggagaacaatcctgccgccacggcacccagcagaccgccgacatccaccatgccacacagcgcatattcggtgcccaacactgcggacagaccgaagaacaggaacacgccgacctctccaagaccgacataaccgtacggatgcttgccaccggtgtagaaccagccggccactagcgaggccgcgcccacggcaaacagccaccatgcttgggaaatcacgatggcggcaatgccgcagacgcaggcgatacctgcacagatgattgccgcaatgaatacgtgcttggccggcaccagaccggattcggtcaaccgctgcggtttgccggattgcgattcactaccgccacgtccggcatcggtaccgcgaacgccatcggagtaatcattcgcatagttgacggcgatttgcaggaacagcgccaccaacaggcacaggaaagtcaccatccagaaccgacccaacagcagatcctgctgcgcccggttcacggcgcaataagccggctcaggatagattgcgacgcaggtgcccatctgctcgatatgcacacgagccatcgccgcacccaccatcaccgaggcgatggaggtggccaacgtcttgggacgcgcacccttgagccacaaaccaatggacataagcaaccttctttccgatataactcggctcccctctctgagaggagctgtcaccgtaagtgactgaggggagtcgctggcggtatcacccttcgactcccctcagtctcacttcgttcgacagctcccctcacccgaggggagccagaaataggtttcagccaaccagcggcttgaccagcgggaaggtgatggtctcgcgaatcgtggcaccggtcagcgcgataagcagtcggtcaatgcccatgcccatgccgcctgccgggggcatgcccacaccaagggcctcgaggaagtcctcatcaatatcgcaggcttcctcgtcaccggcgagcgcgtccttggcctgagccacgaagcgttcgcgctgcacgatcggatcgttgagctcggagtagccagtggccagctcgaagccgcgcacgtagagatcccacttctccaccacgccgggcttggtgcggtgccccttgaccagcggggaggtttcaaccgggaagtcacgcacgaaagtgggctcgtagagcttgtcctcgtagaagtgctcccacaggtgctcgacaagcttgccgtggttctccacgtcgtcacgctccacaccgagcttgtcggcgatctcgcccagatgctccacggaggtaccggggtgctcggggccgccgttcggcacgatttcctcgcccaatgcctcggacagggagtcgtacatgctgatggtcttccattcgccgccgaagtcgtattcagtgccgtcgagcagcgtgaccttgtgcgaaccgtagacgtccatagcggtctgctgcacgagttccttgaccagctggccgatggaatcataggtgccgtaggcctggtaggcctcgaccatagtgaactcgggagcatgggtggcgtcgacgccctcgttgcggaaatcgcggttgatctcgaacacacggtcgatgccgccgaccaggcagcgcttgaggaacagttccggggcgatgcgcaggtacagatccaggtcgaaggcgttcatgtgcgtggtgaacggacgggcggccgcgccaccgtgcagggtctgcagcatcggggtttcgacctcgaggaagtcgtgggcatcgaaggtgcgacgcagggatgccacggccttggaacgattgcgcaccatgttgcgaatgttctcgtccgcgatcatgccgatgtacggcttgcgggtgcgggtgtcttcgttcagatccttgtgcagggccggcagcggctgcagagccttggatgcgatggcccattcggtggcgaatacggacagctcaccggtcttggaagcgatgacgcgacccttcaggtacagatgatcgccaaggtcaacgagctgcttgaactgcttcaaggagtcggctccgatctccttcttggagatcatgccctgaatcctggtgccgtcgccggcggacagctgcacgaagcacaggccgccagcgttgcgcaggaacagcacgcggccggcgatgccgaccatgtcttcggtctcctggccagcttcgagcttgccgtcgtacttggcgcgtacctcttcgatggtgttggtcacatcaaggtgcaccgggtagggggcaatgccggactcaagcatcatcgcgcgcttggccacgcgcatctgcacctgctcggggtgacccagcgggccgaactccttattggagggatccacagcctcgtccagcgtggcgccggacttgattttctcacggatagtggcatcctgcttgagcagcatttccgcacgctcaacagtgctcatctgcgggactgccggggtttcgttctcagtattttcagtgttctcaacaacttcagccatggttcatcagtgtacgcaaagcctacgattaagaacgacatgccgagttgctttgtccagcaccataatgtaatatctacgactgttgccaaaacgggctgtagcgcagcttggtagcgcgcttcgttcgggacgaagaggccgcgggttcaaatcccgccagcccgacccataaggagaaacgttgatctttcaacgtttctcctttttttgttttatcctcaccaagtatcactatccgtatcatcattttgggttccgagacttaaagaaagtgggcggattctagtggtggttgcaacacctgtgttgcaaccaccactagaatccgccaatcaacggttccatccaccgacgcaatggcaatatcttcgggaatgcgcatttgcacccagacagacttcttggtcgatcgagcaccaccacatgccatcgctccacaagtagccgcatttttcgcagctcaaactaacaatatcggaacaggcgccgcagctgcgttgctcgcagcactgcccgtcatcattgcctatctatttcttcagcgatatttcattgctggaatggttgcaggtgtcgaaaaaacattattcaagtgcagcacgactctgaataaataccggcacaaggaataagcattcgaagcaacacatgctcatggcattgttgatggcgcaccgtaacatgtcgcccgaatcaatcgatcgctgcttccgtatgcaataccgtgaaatctcatgagaggaaatatgaagaagagcttgcttgcgctggcctcaggcgcattcattctcggcgccgccgagttcgtgatgatgggcattctgccgcaggccgcagccgccaccggcgtggacatccctaccgccggccactatatttccgcgtatgccatcggcgtgtgtttcggcacattgattctggtgttcggccgcaaagtgccaccaaaggatctcattattgcgttcatggttatcgccttgatgggtaatctgttctccgcattctcagccaacgctgccatgctcgtcattgcgcgattcatctccggtctgccgcacggcgcattcttcggcaccgccacgcttatcgccaaaaccctggccgataaaggcaaagaggcgcaggccgtatccataatggtcacgggacaaactttggccaatatgttgggcgtgccggcaggcaccttgatggccgagtttctctcctggcgtcttgccttcggcattctggccgcatgggccgcaatgacgatagtgctgtcactggcatggattccattcgtggcaccaatcaaagatgccggcatcgccggtcagttcaaattcctcactcgccgaggcccctgggcgatcttggctgccgtgttcactggcaacgcaggcgtgttctgctggtggagctacatctctccctggctgcaaaagactggtggctggtcatcttccctcgtaccaatgctgatgatgctcgccggattcggcatggtagttggcggcatcatcggtggccgtattaccgatcggtggcgtcatgccggcactgccgctctcggccagtccatctcctgcattggtctgctgcttgtggtgctgctgcccggcaaccatggcactaccgcgttgttgacgttctggatcgcattcggattgttcttcatctccgcaccgcaacaattgctgatgaccgaggccggtcagggaggcggcgaactcattgcaggagccgccgtacaagtggcattcaattttggcaatgccatcggctcgattgtgggcggtgctatgctcacttcattctccatgaactaccgcttcaccggtttgggtggcgttcctctcaccctgctcgcagtcggcctgctcacgttctactcatggcgatgcgaaacggacaccgaggccatccatcgcatgcgtgaaatcaaggtcgactgagaccaagctcacagcctattccctgacgtgtctgtgcacagtattaatagactggaatcagacgcgattcagggaggtctctcgtggctgacgaagaagcattgctcaaacaatttgccgcacaattcgctcacggcccgaatgatgctgacgacacagacgcagcggccgcggcacaacacgcgaacaacccagaagatcaggccgcgaccaacgccgaacaatcgtcaacgagctttgacacccaacaattcctgaacggattggacgcgattttcgaccgtcatgcggccgccaccgaagccggcccgtatttggaacaggcgatggttgacgcagagaatgccggcgatgaagccggactgttgaccgtactcaacgaaacaatgggcttctaccgttcgcaaggacgtcataaggacaaccagtggatcgtgcagcgagctctggaactggccgctcgcatgggcctgaccaccggcacatccgaagcatgggccaccacgctcatcaactgcgccaccgccatgcgcgccgccaagcaatatgaccaggccgaagacctctaccaccaggcccaggatgtatgccgtcattcgctggcgcccaccgaccgcagacttgcggcgcttcacaataacctctcaatgctctacagcgaaacgaaccgaccggataaggccgagcttgagctgcgcgaagcactccgcatcatcgaagcatcgagcgtgaacccggacgaggatatcgatgtggccagctcgcatacaaatctggcgctgaccttgctgaccgagcacaagctggaaggcgcccactggcacgcggccaaggcattggatatctataagaccggtcatctggagcattccgcacattacgcctccgcattggccggctacgcgcaggtatgctttgctgaaaagcgatatgcagatgccgtcgccgggtaccgtcatgcgctggacgtgatcgaggaatgctacggcaaggacaccgattactggcgtatcaccgaagacaatctgcggcaggccgagtcccaggcacaagccgcgggtatcgatatcgttccgaatgacactacggatgcaaccactgcgtccgcacaggaagcgaccaatgccggcacctcttgccaaaattccaccgatgcaccagtcatgccgactgccttggtatccgattccgccgcaaccgccacttctgtagttggaatttccggcctgaaactggcccgcgctttctggacgcaggtcggcaaaccgatgctctcgacaaagtacccacaatatgtttctcgcatcgccgccggtctggtgggacacggatcggaatgctatgggttcgatgacgcatattcgcaggaccatgacttcggcccgcgattctgcctgtggctttccgatgaggattacaccgccataggcgagcaactgcagaccgattatgacgcgctgccccgagacttcagcattgacgcacaagggcatgcggtattctccacgaatacctcggctattgcaacagaccatggcactccctcccccgccactccacgcgcacagggcgcaaaccgacgcgatggcgtgttccgtatcggtgatttcttcgagtcgatcaccggataccgcaccgctccggcacagacttcgcctcacgaatggttgatgttggatgaggccacactggccgccgccactaatggcgaggtgtttgcagaccccaccgggcaattctccaagacccgccaaggattcaaagatatgccggacgatgtgcgactggcactgatttccaagcgtttgggcatgatcgcacaagccggtcaatacaatctgccacgttcgctgaaacgtggcgatggcgccgccgcatggctgtccatccacgagttcgtgaatgccgcctcctcattggtgtttctcatcaatgtgccgatggtggccggctatctgccgtactacaaatggcagttcgcggcactgcgcaagctgtccaaatcgatgttcgcgctgctgcctgatgtggccgaacaactggaaagcgtaatgcgtctgagctcagcggcttgctacggcggcgccggtttcggcgagggcggcaagggttccgccccggcgattgaccaaatcaacgggattgtggaacatatcgccgcagagattgtcaaggaactccagagggaacacctgaccacatcaaccgaaaccttcctggaatggcaacggccttacattgaagatcacatcgcctccaacgatccagtgctcaagagtttgtgaggctcgaagatgaccgacaaccttaccaccgacgaactgcgtgaaaccattgtgcaccatgaatggaaccaatttcagcacaccaataacgagggcggccgtgccgcctgccaaggcaattggccggttttccaccagatgcgtttggcccagttcctcacatgggaacggccactgctctccagctacgccgctgatttggacgaagccgaccacgttggccgcaatctcgtcaccgaaaaatacggccgcatgatggcctccaccgcacccgacgacttcgcaaagaacatcgaaccgtacattccgcgcctgactgaatctcgtgtgtccaggcaagaacaggtaatcgcccagcaagtggcgtgggccgccgatttccgttcgcggtacccaaagcttggcgaggcgatgcgcgtgctgaccaccgccgaggacgcgccaacgaccacctcatttgaaacatatctacgcggcgaactcggcacatactccgacatgacttttgacctctatgaagcgatgatccgcgaacgagccgacacaacccctcagcacaacatcaccgaagaaactttgctgaacaccgtgcaactcggcgggttcagcactcttgacgaggccgaggcggctcaacgctgacgctgcgcgcaccacaactacaggctgaatagaccccagaacgccagtgtggtgcatgtagcgagcgcggccaccaccatgatgatgccggccgcacggcgagcgcccatgatgtctgcgcggtgacgccataaccgctccgcgaccacggcgaacagcagtaccagcaccaccgtcaacgcctgcaatacccgccatccgatgccgaaaagccgcggatgcggcataacatatacagccgccacccctacggcacccatatacccgtacagcagcacggtaatcaccattatcgcaacgcctaagccggcaataggccctgcaacaccacggggcatggcccgccacgccaacacaggattggcatgcatcgcacgccgatcgcgcaacatgtacaggcggttaccgtcaacgactattgcattacgacgccggtgacggttgccgtcatcgtcaacatgcgtaccggcatctctccgatacggctgattccatccggcaggcatgtttcgtcctggtacatgccgacccaacgcaccgcgcatgcgcagccaatccacaatatccatggcaataccaagtatgaccgcaatcagcataagcaccgggcctgcaatcatgatgcccgccaacacaccaagcgagccgataatacccgacttggtttgctgcggtgccgcaaactgctgatgaggatgcactccggcgatctgtggcgtggcccatccgtcagcctgagcgcctgcggcaataccattcacccagttctccaacgcctgcgtatacccttgcgccaacggtagattcagcgtgaacagtcccttgccggcccgcatctgatggttgccgacaaagtaccgcacagtaacgttctcattgcctgcgctgcgagccgcgtcaatgatgcgctgcgcaccttgctcaatgggcatggcggtgtcataagcgccgtaattcaccagaagcggcatggtcaaagaacgcaggtaatgatcggcatcgaaatcggcataggcaagatcaaaaggagcgtagttgagcgacatgagtttggccgtgtctttgaccacaggagcgggcgcgccggcttcatgcatataggcgctgacggccatggccatttgctcgcgacctttaaatactggtgccgaagtcaggacggcaaaagcgatatcctgccgcttggatgccagaatcgtggatatccatgtgccttcggattcggcgtagatgccggtttttgccggatcgacgcctgcagtgctacgcaacacatccaaagaactgctgtattcgcgggcgaatcgctggtagtcgcgatgcagcacggtgtaattgtcattgcgcttggccggaaccagcgtcacaataccggcggatgccatagcgttggcaatgtcgccgaagtcttcggccccgctggtgccggatccatggatgaacaggcaggccgggcgactgccaggcgcatcaatcggctcccgcaagatggccggcaacgtgactccatcgtccacttcaatagacaacttcgtttcacgagtgcgatatccgccctcatgcggaatgtccgcatgagcaggagcaatagcgggatcaggcgaggaaacggcaatatgatcgctataaggccgagtgctccactgcggcatcatcgcccagccaagcagggagaacactaacgcaatcaccaccgcaatcgcagcgatattcagcactcgccgcactgtgatccgcgtcatccgttctacctcccccacaagcatagaacgccttacttcagatatcgcatagtaccgaagtatgatttcttagcccctcagtcagctgtgctcgcaaaggggcttgccaaacaatacgagttattttttcttcacggcgcccataatggcccacacgatagctatggccaccaagaccacgcccactattgcgcagacaatagccaccaacacctgcggatcagcggcgaactgtgtgatcagcatatcggggaacgtcacgccgaagaacaaccccagtgcgccaatcaatacgcccaatagaccgaaaacaacggtcagtgtactgatgctacttttcttggcgggttccatccttgtgctcgactgagactgagcatccacatgctgtgcggatgaggcgaattccgcattaggcgaagttccagatgcagtctgttcattccccgaggaagcgttgcccgccgcatagagcggaatgtcgcttgcgggcggaattgacgtatcggcaaccgcctccagaggaatcgtcttctcgtggtcgtccgacacgatatcttcggattcctgattgtcgtcagcagacggaatcaccgtcgttgccgaaccatcagccgccgtagtcattggccgagtctcatcaatactgtcgtcaaccacgggcagggccgaggtctccaccgtatcagcagctgttggcagcacctcggtctcagccgccgtttcattatcgggcgaatgcagcaccttggtctcgtctgcatcgtcggataccgacagcggacgggtcttggcctggtcttcgatggtcttcagttccttggtgtcgtcgctcatcattctgccttccctgagtcctcggtgtatccgttcgtcgtatcgaagttgttcctgaattgcatatacgtcgacccttcccaatccgagatataggtcatattcacccgggcgccggccgagaaggggatgtctacgagcagctcagggccatttgccggcattttgctatcgtccgtcatccaggcatagttggtgtcatagctgtcgatggaatgcccctgatcggtatcggaaaacccgataaggtccaccgtgtcatatatcaccgcatacttgccgcccatgctgttgctgtacgtgtacccgcgccatgcactgccaatgccgtaggagcacccgtcaggaagaatgatgtgaacctgagcctgaaccgcggatatggtgatggttcccgccgggcagttgctgatggatgtattgccattcgacaattccagcttatgaggcgcatggctgctttcccaatccgacaggtcaagcacagcctggctggagtcgtagtcgtcaccggagaaccatacgcccctcacgagtttatcgaatgtccgttggctggaatccgcataaaactggtcgttgacctgcacctggttcataccatacgcgtccaccgacgcatggccgccagcactggacagcgtgatatccgtgtaactgatattggtatgcgtcgcatcgtaatggaggatggcatacgtaccgctcgcgataatcatgcacatcgcgcaggctccggctatcaagcccagcggaatcagtccacctgcacgacgccccttgaatcccagcacaatgacaatcagacccatcaccacgcatactgcggaaatccatatggtgcccacgcgcacgatgccactgacgtccatgtcatattcccaaatcaccgccataacggcagcgaaagaaatgaaggacagtcccaatacgctcagcaccacaaccgggccggccggcttgcggcgggtggaggaacgcggcgccgcagccgcgacaggattgggcattgcatacttgcccgcagggatgccatctaccggcatcgccgcagagctgcttgtgggattatacggccgctgccccgcctgcggaacaggctgtgaaacatatggaaccgactgtgaaacaggttgtgaaacatatggaggcatcgttgcagacggttgcatagaggggttcggtgcaaggttattcggattattcggtccgttcggattattcggcggcgcggtggactgaccaccgtggtacccgaaaccgtatccttcctgctggcgaacaccgctttgcgcaatcagccacagcaccagagcggcgagcgcaatgcacacccagccggcgcctggaatcagcacagccacagccataaacaggaagcagccaagacaattccaatcccactggccttcaatcaaatcttcggcgagaatctgtccgctgcgcacatcgggaatgagaaaccatcccattgcgtatagcgccgcgccaaaaccaaagaacagcgtggccacaatcatcagcgcacgcactaatgtcgggctccaaccgagacgctgcgcgataccactgcatacgccgccaatccaacgatcattgccgcggattaatccggaagaacgcacccatgtaaagaaacgccgcggagctttgcccggctgcggctgttgatacgaattcatatgtggactgctcatgcttccattacacagcccgaacgcagccacaaggctcggggaacaccctgattgttccctgaacaccatgtaaaaccccggttccaaagccctgaacgcggcacaatagagatatgacatcaattcccgaaccgctgctgcccgcgcgtatgccgttgatgcgacccaaacgaggccgctggctcaccggcgtctgcaaaggcatcgcactacatctcggcatttctgtggtgtgggttcggctggcattcattgcactgacctgcttgtatggtgccggcattatcgcctatgtgttcctatggattttcatgccggccggcgatcctcaggctgtggcaagtgcggaacatataccagtggagcaagctccgctcgcgcggggcaaccagcccgcacaggccggcgttgaagacacggccgtctcggctgagtcattatccgaagccatccagcgcgccccgaaacctgcgttagtggcgttggccgggttcgtgttgctgaccatcggcctgctgctggtcggcaccggcgctgatagccaactcatcattccgctgctgcttggactggccggcatagccttggcctggatgaatctaagcccgaacggcacacagctgctctccatgctgggtggcatcgcactcattttcatgggatgggccatatatgtgtcgaacgtgacctacgtcgggtggggcacctcgccacgtcgcatcatgctcagtggattcattatgattgcgtgcattgtactggcggtgatgccatgggcgaatgccatgctacaaaggctttcccgcgagcaggcgttgaaagagcgcgaggaagagcgcgcggacatgaccgcccatctgcatgatggcgtgttgcagacgctggcgctcatccaactgcattccgaagaccccgccactgtgttcaccctggcgcgcgggcaagaacgcgagctgcgcgaatggctgtatcaggaacgttccacatcggatcgttccgtcagcgccgggctgaagcagatcgccgccgaggttgaggacgaacatggcaaaccgattgaggtggtcactgtgggcgatgcccatccaagcgcccagaccgatgtgctgttggacgccacgcgtcaggcgctggtcaatgccgtcacacatggcagcgagccgatctccctctactgcgaagctacagatacgacggtcgaagtgttcgtgcgcgaccacggcgaaggatttgatatcgatgcaattccgcctgaccggctgggcatccgcgaatcgattatcggccgaatcaaacgccgcggcggtacagtggaaatcgtatccagagccggctggggcaccgaagtgagaatgcatatgccgattgcattgaaatcgacacaaggagagcatcgatgagtgaagctgcagcagaccgcattcgcgtggcggtagtggatgaccacgaaatgtttcgcgccggcgtgattgccacactgcgagactcttttgatatcgtcggccaggcggcggacgtgcccggctcggtggcgatgattgcccagactaaaccacaagtggtattgctggacgtgcacgtgccgggcggcgaaggtggcggcggtgccgagatccttaccaagtcacgcgcctactcccccgctactgtgtttcttgcgctgtcggtttcggatgcgcctcaggatgtgggttcggtgattcgcgccggtgcccaagggtatgtgaccaaaacgattactggcgctgacttgatttcctccatcaagcaggtgcatgagggctatgccgtgttttcgccgaagctggccggattcgtgctttctgcattccaaggtgtgccggccgccggagccgatggtgccgcgcctgtgcatgacgaggaactggacagactttccgcccgcgaacaagaagtcatgcgattgattgcccgcggatacacatataaggaagttgccgtggaactgttcatttcgattaagacggtcgaaacgcacgtgagctcggtgctacgaaagcttcagctttcgaatcgcaccgagctcacgcgctgggccgccgatcggcggattgtatgagatataagagagctcccgttggcgggagctgtcggcgtagccgactgagggtggtcaacgtcatgcggcacaaaccaccctcagtctcacttcgttcgacagctcccgccagcgggagctaaaaatcactcggcgtcgcggaaaccgttggggttcttggtctgccagttgagggaggaagcggccatatcgtcgatggtcaactcggccttccagtccagctcctttgcggccttggaggcatcggcatagcatgcagcgatgtcaccggggcgacgaggcttgatcacgtacggaatcgggtggccggcagccttctcgtaggccttgatgacctcgagcacggagtagccgtggccggtacccaggttgtagacgaacacgccttccttgtcgatgtggtcgataacggccacgtggcccttggccaggtcgaccacgtggatgtagtcgcgcacgccggtgccgtcaggggtgtcgtaatcgtcgccgtagacctgaacggccttcagctcgccaaccgcgaccttggccacgtacggggtgaggtttgccggaatacccttcggatcttcgccaagcaggccggactcgtgagcgccaaccgggttgaagtaacgcagcagcacgatggtccaggacggatcggccacgtgaacgtcgcgcaggatctgctcttggaacagcttggaagtgccgtacgggttggtggtgccgccagtcggcgtttcctcggtgattggcagctccttcgggctgccgtacacggtggcggaggaggagaagatgatcttcttgacgttgtgcttcttcatcaccttgaggagcacgagcgtggagtacaggttgttgtcgtagtattcgatcggcttggctacggactcacccacggccttgagaccggcgaagtgaatgacccagtcgatgttgttttcagtgaagacgcgctccatcagagcctcgtcacgcacgtcgccgtcgtagcgcttgaccggcttgccggtgatttgctcgacacgctcaagtgccaccggagacgaattgccgtagttgtccacggaaataacgtcatagcccttgttgagcagttcgatgtcggtatgggtagcaataaatccagcgccgcccgtaaccagaacagtggtcatgtttcctccttgggaaggatgttgccttcggtttccttcgctgccaactttatcacagattgtgccaaaatcgaacttttgcgcaagttttctgttcgctcgtgttcataaatgtgaactattggccgggactacgttctatttcatgatgtccgcaacgatggcgtgcgtctcatcaaccttctgctccatctcctgcaccagcttgatctgggtacgggtacgtaccagattgtgctcaggatacttcgtggcaaagtacacgtcgccctccagataatcggcgaggaaacgcatgccgcattccatggtgagcaggttgccgctgaaagccaacagctcggcctcgcgctcggtgatgctgccgcgcagctcccccacaaaaccttcggcgtaagcacggaacagctcggtgctgaaatgcactttgtccaaatctttctcatcttccaaagcagtggaggctccaaagcgaatcgaatcaccgaaatcgaacagcattgagcccggcatgatggtgtcgaggtcgatgatcgcacgcgcctttccggtggtggcatccatgagaatgttgttcagcttggtgtcgttatgagtcacacgcagcggaatcgagccgtccttcaatccatccatcacggtggcgtactgatcagcatgggccagatagaagtcaatctccggctggcagcttgcggcacggccgagcttgtccgcggcaagggcggccttgaaatcctcaaaacgatgaggggtgtcgtggaagtgcgcgatggtctcggtcaactgaccggcatcgaacccggacaggaaattttggaagtcgccgaatgccctgccggcctcacggaatacatctggattcggcacgagattgtaagacacggtgtgctcgatgaatttgtatacacgccatgcaccgccatcgatctcttcccacgttgcgccggaagtggtgggcacgatatccaatgtctccttgccccgagctttgagggcagaagtaactagttcgacattgcgcatcagatttaccgtatcggggaaaatgctggtgttcatccgctgcaggatgtaacgggggccatcagtgaccaccagataagtggtgttgatgtgtccgtcgccataaggctcgacgctgacgatattgccctccagtgcgaagtgtgaggcgatgtcaaatagtgtttcctggtttgcggccatgatgaggtccaatctccctataaagccgcaataagcggcattgcttatttgttaagtatatatacataaatagacattgatatgatttgcaacacccgagaacgagccacaacaccgtggacgaacgcgcatacaggggtatctgttttcaaagatgcacattctggccgttgcagaatgctatctgctttcaaagaggtaccgcgatgcggaaaacccaagtatagatgttgatatttcaacgcccatacttggattttcgacgaactggcacccctttgaaagcagatagcattttgcatggggaccgatgtacctctttgaggggagaaagccctctattttccgcatttctcccctcagtggactaactttgtcagtcgttgcgccaggcgatgccgctgggctggaggtcgaaggtctcgctcgacccgtcggccagggtcacggtggtcgtctgcggctggtcggtgttgttgaccacgcagtacaagccctgtccggggaagtgggcgacctcgcactccgggttgctggagctccacgccgcgtaccggtcctccttgtggctggcccagaacagggcacgttccaacaacctggcgttggccgccgaatacggcaggccggagatatagacgccgcggcccttgccgtattcgttggccgcgagctgcacctggccgttgtccgcgcgcaacagggtcacatcctcgctgaccggatacgtattcgccacggcttcgccgaagtcgatgccgcccaacggggcgatgccctggccgccgccgcagcccgacaggggcgcacggtagccggcccgctcccaggccccgcgggccgccgggtccacgggcacatccgtggtgatgaaatgctcgggtgtgacgggcgggaagtacttgtccaccgacagggtctggaagcgctcctcgtccacgcccagcacgtccgccagctggaagaagcggcccgcctggaagcgcggcagcgagctcggctcgccgacgcccaccagcgcgccgccgtcacgcacccatgcgcgcagggtctccacgagcttcgggttggtccacacgtcgccgccggtgaatgcggtgtcgaccgggccgccgttgatgattacgtcgatatcactatcgatgccatgcgcgagtacgtcgtcgaagctgatgaaccgcacgttcacgcgcatgccggacagggattccagaatgccgtagtaggagtaggtctgcttgttgggcagggcgtgtgccacggtgaacgccatccaggaacgcatcttgccccaggaattcagaatcgccacgttgagctcgccttcggcggccaccccaccggtgcggtcgtggatgtcgcggaattcgtcggcgatatgggtcaccgtgtccacgaacttcgggaacttggcggccaaggagaggtagccaccgtagcccatacggccgatcggcgaacgcaggatcgcgcggcgggccttacgccagttgtcgaggccttcgatgctcgggtcgttgccctcgtagaacgtgtcggggaagaagtacggcaggaagcgtccttccgtgtatttgacgcccggaatgtccgcgatcatgcgggtggtggtgccgtctccgatggagccgacgaccgcatccaaacccagcttttcgaacccgtccttatacggttcggtaccgatccactggtcgccaaggaacatcatggcttccttgcctgccgcgtgcgacatgtcggcaagccgcttgacgttctcgcgcacgaatccggagaggaagtcaatccagtcgcgttgcgccttgcggggcacgcgccacgcggagttgtaggcaccgccatccacgaaatcctccggacgcagacggtaaccgtactccttctcgaaatcgtccaatgcgcgcgggctcacggtgcaggcgcaaccgaaccagtcgaccaccttttcgcgacgcttggcatcgaacaggagcgtgaactggtagaagaacgtggtgaaacgcaccacatccacctgcgggctgtccttcagccactgctcgaacgtatcgaacacgaacttgcgggtggccggatggtagatgtcgaacggaatctcgtgttccttgtctccccaatcattggtcaggtggttgtacatctcgaccgggtcccagatgatgtaggccaggaaactcaccgtgtattcgtgcatcggcacggcagcggtcacgtgcacggtgtcctcgcccgggtcgagcgtccagccggacgggtccacgacctcgcccgtggtgcggtccacgacttcccagtacttatgagggtcggcgtcacggttaggcttgagctgttcctcgaagaaaccgtccatcagcggcacatccaccgcgttggactcggccaggatacgggcggtcagcaggtagacctgcggggtctcgtccatatgcagggtgatccactcgttgtgggcgcgggtcgggaagtaggcgctgtagattttcttgccaagagcgagcactgcctcgtccagatgcgtgccgtcggagttgcggatggcgtccgcaccccacaattcggcgagttccttggtcttttcggcaaaattctcttcactgggcagcgtgaagcggccggtgctggtcatgagtgctcctttgcggggttggtcatcaaaaaactacaaagcgacgaattcgtcgcatacaaaatgaccggcgtcatcgcgggccctggggccctgactgcgtagatccttgacgcttacggtgacgccggacgattggaatcgtgtcactgaatatgggaggggacgttgcccggcaccggaaggagtgacacgacatgccgggcagcggattggttagcccttgacggcaccggcggcgaggccggactgccagtagcgctggaggccgaggaacagcacgatcacgggcagcacgccgagcaacgcacccatcatcagggcgccgcgatcggtgaacgtggccagcgagaccatgccgtacagaccgagggtcacgggcttcaaggtgtcggaagacaccatcatcaacggcagcaggaagttgttccacgtggccacgaacaggaacaggaaaatcgtcaccatggccggggccaggagcctcagcacgatggtgaagaagatcctcgcctcgctcgcgccgtcgatgcgggcggcttcaagcagttcgtccggcaccgaactctgtgcgtacgtgcggcccaggaagaagccgaacggcgaaacgcagcacgggatgatgatcgagagcatagtgttggtcaggtgcaacgtatggaagatcgagtacatcgggatggtcagcagggcggacggcatgagcatgcaggccataatgatgccgatggccgcgttcttgccgcggaagttgaattttgcggtggcgtagccagccatcacagacacgatggtgccgatcaatgccgagacgcccgagtagatcagggagttcagcacccagcgccagaagttgccacgagtccagccaagcagcttggaatagttagtggcgatggcattgggcagctggtcaagcggcacagcaaaccacatgccgttgctaccggtcatctgggccggcgtcttggtggacgcgatgatggcccagtaaatcgggaacaggaagtagatcaacaccagtaccagcagcaccacggtgagggtcttcacggccgcggacggtcgcatggagcgaggcaaatcgtgttgcgcagcctgacgctgcttttcgagcttgcgctcggcctttttgcgggcgcgttcttcaacggttgcggagctcattactcgttcaccttcctttcggccaaggtgtacagcacggcaagcacacctgcgatcagagccatgacaatggcgatggccgaggccggaccgtcaccagacggggtaatggtgccctgagaagtgttcatggccatcatcatcggtgtatacgacttggaaatacccggatcagccgtagacatgatctgcggttcgttgaacagctgaatggtgccgacgatggaaagcagcatggccagcagggccgcgccacgcacgttcggcagcttgatcttcgtggcaatctgccaaccattggcgccgtcgatacgggcggcctcatagaggtcatgcgggatggcctgcagtgcggcaaggaaaatcagcatgttgtagccggtgaaggtccatgtggtgatgttggccatcgagccgagcactatgttcttgttgaagaagtccacattgacgccgatggcggcaagtcccttgacgatcggcgagatttggccgttgtacaggtagacccagataatcgaggccacgacgccggggatggcgtagggcaggaagtagcccagacggaaaccggtgacatgcttgaccacgaacgagtcgatgacgatggccaacgccagtgcggcgatgatcatgatcggcacctgaatcagggtgtagagcagcaccctgccgacgccggaccagaagttgccggaagtaatagcatactggaagttctggaatcctacgaatttattgaccagctcgccaccgccgtatgcgccaccgccctcggtgacctgacggaagaagctggaatagatggcccagatgatgggcaagatgaacacgaaagtgaacaggacggcgaacggtgccatgaacgcccagccggtgcggttctcgcgcttctgagcgccggaccgcttcgacttggcggcggcacgcctaggtgctttgcccttcgcctgagtagtggatgcagtcataatacaaaacctgtcttcgcaaagaacagtaaaacaaatgacaagggccacagcgcccctgcagcaatacccccaaacaatacggaaggccggagtatgtgccccggcctttcgctatggtgatgcgaggcatcggaggtcttggacggccggctatttcaagccggcccgttgacaagacctagtgaggtcactccttgacggacagaccgaggttcttcagcgtatccaccgaggtcttctgagcggtgtcgaacacatccgaaaccttggcagaaccatcggcagccttggcggcggtctgtttcattgcagcgccgactgcggagaagccaggcatgtaggtgaagtcacccatgttgtcgttcgcggtcttgaactcagccatgacatcctgtccgctgaagtagtcggaccacttctgcggggtcttggcatccgcggtggtggcggccacgacaaggccctgggagacaaggtcatcaacctgggtgttgaaccagtcaaggaactccatggcttcggccgggtgcttggaacccttgagcacggccacaccggaaccaccattggcgccggtcttggtgccattgccgaaccagtcaccgagctgggtgaccttccactcaccagcaccagtgccaccggcggaatcgatgaacagtggggcttcccaagcggcggccacggtgccgatcagctgaccggactggagggagttatcaaacgatgcatcccaacgcgggttggtgagggcggccttgttgtcgatcagctgctggtagacatcggccacggccttggagcccttagtctgggtgttgacaacccaggagttgccgtcgaccttgtaccacggaccggaagcgccggcctggccggacatcatcatcatggcctcatcaggtgtgaaggtcatgatgtacttgccttgggcagcggtcttcttggcggtctcaatgagctcgtcagcggtcttcggcacggtgatgccgagcttctcaaattcagcggcgttgtagaagtaagtcagcgggccggtgtcctgcggcagaccataggtcttgccgtccacctgcatcagtgcgaacgggccggaagcgaaatcgtccttgtacttggcggcctcatcggtgacatcctgcagaaggcccttggtgaagacctcaggaacctcggcgtaaccgacctgagccagatccggcgcattgccagccttgacgtcggtctcgagcttcttgatcatgtcggcggcattgccatcgaacttggtggccttgacctgaatgttcgggtgctccttgttccacttggccacaatgtcgttgaccaaggtcatgccttcggaatcgggcagacgatgcatataggtgatgttgaccacaccgccatcgctgccggacttcgtgtcgccggcagtgtcgctgccgccgcaaccggccaaaccaatacccattgctgctaccgcggcaagagcagccacgatgcgcttgttgtgcgataccatatctctactccttcgataatggcgtcatcactcctctgtgacgactgttaatcagtttaggcgctcaaatctttattgtcaacctaactaacaatttctgcgcgccccagtggaatagtgacattaacccggtttgattccttattatgctcgttttgtcattttattaatactccttacaaagctacatacttatggtctaccagtggaccatgcgtgaaatacgaaaaagccccggattgctccgaggctcatcgttcacaggcggacagagcgagattcgaactcgcggagggttgcccctcaacggttttcaagaccgtctctttagaccgctcagacatctgtccttatgcacatgcgcatgtgcacgatatttgattatacaaaagggaaggatttggggagcggacacagtcgcactcccccataagccttacatgcagctaatctgccagcgggcctgatgaaatcaggcctcccatttagtcggctcgatgacttccttgccgcccatgtaggcacgcatggccttcggaatctcgatggagccatccttctgctgatggttctccatgatggcgaccagccaacgggtggtggccagcgtgccgttgagcgtggagaccgggcgagtgccgccgtcttccatacgctcgcggatgttcagacgacgagcctggtactcggtgcagttcgaggtggaagtgagctcacggtaacggttctgggtcggcacccaagcctcgcagtcgaacttgcgggcggcggaggagccgagatcgccggcggcggtgtcgatgatgcggtatggcacctcgaccttggcgagcatctcctgttccatagccagcaggtgctcatgctccttgtaggagtcctcctgcttggcgtagacgaacatctccaccttgtcgaactggtggacgcggatgataccggaggtgtccttgcctgcggcgccggcctcgcggcggtagcaggaggaccaaccgcagtaacgcagcgggccattgccgaggttgagaatctcgttctcgtgcatgccggcgagcgccacttcggaagtgccgaccaggtactggtcatcgggctcacgcaggcggtagatctcgtcggcgtgggagttcaggaagccagtgccgcgcatgacttcggggcgcacgagcgtcggggtaatggccagcgtgaagccgtgctcctctgcctggtcaacggccatagtgagcatggcaatctgcatgcgggccacctggccacgcaggaagtagaagcgggagccgcccaccttgacaccgcggcgcatgtcgatgccagccacgccggtgccgagggtcaggtgatccttgggctcgaaaccttcagccgcgaagtcacgaatctggccgaccttcttgacgaccacgtaatcgtcctcgccgccctcaggagcttccggctccacaatgttggagagcttccacatggcggtggtgtattcctcagcagctgcatcggccttggacttgaactcggcgaccttctgggagagttccttggtttcggcgataagcttggccttttcgtcagccggggcagaggcgaccttcttgccgatttccttctgctgggcgcgggcctcttcaaaagccttgagcgactcacgacggacagtgtcggaggaaagcacttcgtcgacgagttccacggactcgccacgcttgcgctgggattccttgacgatatcggtgtgttcacgaatgaattgaatatcaagcatgagcaccagactagccccgcaagccgacaccctcaacaaagaaataataaggagtagagcatgctctctcatacatcttttacggccgatgaaaccgcactcggacggtagcaaattccaccagacggaatcagggtgaataataatctcgcttagagtgggcgcattccgtgcaggaactgttcacgtacttcctgaatgcagcgaaaagaagccgtctcacgctaacaataggaatcatgccccagcctgcgctcactgtatttcttgttgtggccgcgatcgttatcgtcgcggtatgtgttgccgtcatcgtcatcgcgttgcgggcgcaccgtcgccgcaaactggccgagacattggagaaacgcagggatgacgaggtgcagtatgcgttcgtggtgaacccatccaagccacaggccaccgcacgcaggctccacattcaggagttctgcaaagccaagggtctgaatcgggtgcgcttctacgacacccaactcgacaaggacggacgtgactgtgcgctcgaggcgctcgaagacggcgctgacgtggtgatcgcggtcggaggcgacggcactgtacgcacggtggcaagcgccgtatccggcaccggccacgcactgggcattgtgcctattggcaccggcaatctctttgcccgcaatatgggcattcctgtggacgatatcgatgcggccctgaccgtggccacatcgcacggatcgcgcatggtggacatgggccgactcacgctgctcgatcatcccgaggacgaccacggccatgcgttcctgattatcgcaggcatcggcttcgacgccgccatgatcgacgacaccgatccggacttgaaggcgaatatcagctggctggcatacttcgtgggcggcgtgaaaaacctgttcgccccgaaattccgcggcaatttgactgtcaccagcgccgacggctccacacacaccaccaataatcttgcatttcgcacggtgatggccggcaattgcgggcagattcccgtattctcgctcatgcccgccgcgtcctatgatgacggcatcctcgattttgaaatcatcgacaccaccggcggcatcctgggttgggccaacctgttcggcgacgtagtgcaccaaaccattatcggcaagcctgagcagaacccactgtccaccaactcgaccattgagcaggtgcaaggtctgagcgcggaaatcgtattgggaaagccagccaaggcccaggtggacggcgatatgctgccggagaccaaacacatccgattctcagtagatcaccgggctctgatcgtacgcgtacccgatgcttccgcactggagaaaaccgctcaggtggcggcgcagaacgccaccgctgatttcgcagaaacgaccggcaccatcgagccgattcgctgattcactggcccatatgcgccagctgcggatggtcgggaatatccgaggaacgattctgattcgtttgatccgtgactcgtgccacatgcaatgtcaggtaggcaacctcgtcttcggtcagcgtggtatcgaggcgcagctcaataagggatgcgataagtctcgcgcatttcgaggcttttgcataggagctcataatcgaggaaacgattgcatccggctccctgctgagctgctcatgctgatgaatacgtacgaacaaataccgaagatgggtgatgaaacggccgacattaaccgaatgctcatccagcttgatgttataggtgctttcgatgacagcgagcaactgttggatgacgccggtcatcatatacgtaggagaaaggtcgcctgtggagaagccggcattcacaaaatgcagcgcaaaagcaacgctctcgctgggatccagcgcatcgtccaatctacggttcagcgcggcgagcagtgcgcagccctgctggtattcacgcttatacagcgaacgaatttccgagttcagcggatacggcacaggcggaatgccgttcttggcgcggcgtaaagcaccgcatacatgatccgcgagcgccatgaccaacgtcgagctttgtgcagcctctgaactcaggccaacctcatccatggtctcggaaatgagacgaatgatttcaggaggaatatcgcccagcaactgggccatatggtcagggtcacggccttgagccggcacgaacacacgagccactttggcatcgtcaactgtcatgccgggcttggccttgaaccccagaccccggccggtaaggatgacttcgcgcccccgatccttcgccaggacgacgttgttattgaagacgcgaagtatttccatgacatcccttccgttcgggatcttcgggttacggttgcgaaccgaccatgattactgttcgatggcgatgacttcgtcaccggccgcgacgttcacatccgtcttcggagtaacggacttgagcgctgcggtgttcagtaccgtaaccagcgtagtggtgctgaatccagccttcttgacttcgtcgagatcgacagtcgccaacaggtcaccggcattcactcggtcacccttggccacattcaccacgaaaccattgccattcatcttaaccgtatcaatgccgacgtgtaccagcacttcaatgccatcgtcggtcttgagaccaaaagcatggccagtctcagcaacggtctgcagcacaccggacaccggagccttaaccgtgccgtcaaccggctcgatgcccacgccctcgccgagggcacgagaagcgaacaccggatcgccggcatcgtcaagggataccacgtggcccgcaatcggagcgaacacggcggaagtggcggtcgcagcggcagccggggcatcggcaacggcaacagcggcggttgcggtagcggtggtggcgtcaccaccgttcacagccttggcggactgagccgcggcacgggccttggcttcggctttctgctccggagtgcggtagtcaagcatgataatcataatcatggcggtgaagaacgacactgcgatggagacgccgtaaacccacatctggttgaacaccggcacggtgagcagcgaggtgaaagcgaatgcagtggtggtcacgccgtgcacggtctcgccggaggcgacggtggccgggaagagccagcccatgacggcgattacgacgccgcccacgccgcagccgaccagcatacgggagtagatgagcttgtaacgcaggtggatgccgtaaaggctcggctcggaaacgccaccgagcaggccggcggcaagagcaccgatggaggtctggcgcatgtccttatccttgtcgcggatggagaggaacagcacaccggcagtggcaccgaagcaggcgaagttccacacgcccatcgggccctgaatgaagtcgtagcccagggtgttgatgttcatgatcatcagggcgttcagcggccagtgcagacccagcggcaccaggaacgggtacagcagcgggattgcgatggcgaagatgaacggagcgtgagtgttcatccaggcgagtccggcgccgaggccgttgccggcccacacaccgataggtccgatgatgaaagcggtgagcgcaccgacgatgatcatggagaagaagggcaggaagaccatctggacgctgtccggaatgatcttcttcagaccgtggtacacgaccgcgagcacggcgaccatcagcagcggcacgaacacgttgccggagtagtcggacagctgcatcggcagaccgaacaccgtggcggtgcaggaggaggtgcccagcgtggtgttctccacgcacttgacggcgtcgccccaagtcttggtgtcagacagggatgcgaactgcggggtcatgagcatgcccatgattgcgccgcccagccacggatccaccttgagcttcttggctgcattgtaggcgaccataatcggcaggaagtagaacacacccttccagatggcctgcacgaacaccaggccggtggtggcggtgtcgttcggaatcaggcccagggaaatgcacaggttgaccagtgcgatgatgatggacgcgccaagcaacacacccagaatcgggcggaaggagtcggccaggtattcgaagaagctatcgagccatgcgaccttgccgcgagccttggaacgagcggcggccttgacctccgcatcagtcggctcatcggcatcgtcgtcaacggtgccggcgccgagaccagccatttctggcaggtgcatgatctgctcatacacggaggcgacctgaccgccgataacgacctggtatcggtcgccggactgcggcacggcgcccagcacaagcttgttggcgtcgagcgcggcattgtcaaccttgccggcgtcattgagttcaaagcgcagtcgcgtggcgcagtgcgtcagcgacttgatgttggccgcgccaccaacactggtgacgattgccttgatatcgtcttgatgcgacatctcttactccattccttttccacggttaagccagtacctaccagagaaaccaccctgttcctgagcatctgcgttccaggaaccggcagtcacgccaaataacagaaaagacctgagatatggacgccatcatgaatacacatgactacgtcaacatctcaggtcttgcctcaacatttgagtagcaaccctgctaattactgactgaacagcgattataacgagctgataacaatccggcaaatcacacatatggtcaaagcctgcctatacctcgaaacataagacgagagtaaggaagaacaggctttaatcagcgatgaacatccggcgtgtctttcttggacgatacatccgcaatgagacggcacgcaagcctatgttcaggctctttgcgcaagccgcgcgccaccttcatgcacttattcgcacaaaagttgacaacttttaacataatcatgcccaaaacgacaaaaaacgtggcagaataaaagtatggtagcaaacaatgcgggtcaacccgccaccccagcagatctgatcaatgtcgatgaggttatcggcaagtactatgacctcgtccccgaccccagcgttcccgagcagcgtgtcatcttcggcacctccggtcaccgtggatcgtccctgaagacctcgttcaacgaggcccatatcgttgccatctcccaggccatcgccgaataccgcaagaaagccggcgtcaccggcccgctgtacctcggctccgacacccacgcgctgtccggcccggccaagaagaccgccatcgaagtgctcgtcgccaacggcgtgcacgtgcgcatcgattctcgcgacgacttcgtgcctacccctgtggtctctcaggccatcctgacccacaaccgtgcggccgacgacacccagcgttttgagggcgaaggcttagctgacggcatcgtcgtcacgccgtcccacaacccgcccaccgacggcggcttcaagtacgaccccgtcaccggcggcccggctccggccgaaaccaccaacgccatcgccgcccgcgccaacgagctgcttgccgactacaagaacgtcaagcgcgtgccgtacgaggaggccatcaagtccgagtacgtcgagggcttcgacttccgcgagcactacgtggacgacctggagaacgtcatcgactttgacgtgattcgttcttccggcgtacgtctgggcatcgacccgcttggcggcgcttccgtgaactactggccgctcatcaatgagaagtacggcctgaacattggcgtggtgcgccctgaggtcgacccgacctggcgcttcatgaccatcgatcacgacggcaagatccgtatggacccctcttccccgtatgccatgaagggcttggttgacgagctcaacggtggcgcttgggacaagtacgacctggtcggcggcaccgatcccgatgccgatcgtcacggtatcgtctgcccgaactggggcgtgatgaacccgaaccactacatcgccgtgtgcgtggagtacctgttcggaggcaaccgtccaggctggcccgagggtgcagccgtgggcaagacgctggtttcctcttccctgatcgaccgcgtagccgcgtcgatcaacgcgaaggtgctggaggtgccggtgggcttcaagtggttcgtcgacccgctgttcagcggcgaggttgcgttcggcggcgaggagagctccggcatgagcttcctgcgcaagaatggccgcgtgtggaccaccgataaggacggcctgattcccgacttgctggccgctgaaatcaccgccaagaccggtaagaacccggcccagctgcatcaggagcaggttgagcgcttcggcgaatcttggtacaagcgcgtcgacactccgaccacgctcgaacagaaggccaagttcgcggcactgtccggcgacgacgtgaccgcctccaccctggccggcgaggacattaccgccaagctgaccgaggctcccggcaaccacgccaagatcggcggcctgaaggtcaccaccaaggacaactggttcgccgcccgaccctccggcaccgagaacatctacaaggtgtacgccgagtccttcgtctcccccgaggcgctggacaaggtgctcgatgaagccaccgaagtagtcgacaaggccctgggcgagtaaggattactcaacaagccgctccggcaaaactcagatgagggcttgattgttggtttccgccaataatcaagccctcatcttattggtcagcgttttcatatgaaaatatgcatctcaagcggctctgtactgctttatcgtgggacaacacgaaaaaatggccctttagaagatgttgtcccacataatatgggacgacattgcaatagatcgttttaaattcatgttgtcccaacggagtcattccaagaaccgcggaaaaccgccattctcacgacaatcgacggaatcttctccaatgccgtgtgggacaacatggaaaaaacgagcaaattcacatgttgtcccacgctgaatatcatcgcagcaatgctcgcatcgtatagcaccccaagatacgagccaacaacgctccgagaacgattcgaccatcgacattgactcaatggctaagactccgcagctctgcaacaacattcaaattaggaggcatataagcaaaccagaatcgcccccgttggcaccgcacccaatcctctttcccggtgctagtgcacaatgcccatcgcaacgccgagatactttaaccctgccgacggagccgagtctcagccaactgctcaatagacatagcaattacctgaaaatcgaataccgcacctcgcaaagcaagagcacgtgccacattgaatgagaattctgcacatgcagcctcgtccgcaagattagccgccgtcgccacgaacgtaatccactgccgggcaaccaacttggatcttttctcttgatccctacgccactgcgttttattggtgcgatgatggtcgccatcatattcgattgcgaccttgaattcgggccacgccaaatccaacgttacaggagccccagatctaaaggtcatgtccggaactatataattcaccaccggctgaggaataccatgagtcagcaacgacagtctttcttccgactcttttggcgagtccacaccaggcataatcaacgacaacgcacgaacgcacatcgttcgtcctttgaaacgaggaagctcttctacaaaccgtatcagatcatgataaatggttacggcatcacggccttgagacaacgccggctgcctactcatggcggtaatgatggcatcgccaagcacaatcagcgttcgtagagatacatgcgccgaaagttgcgcccatgtatggaataaatcaagcgcataaacatttcggctgatttccacgacacccgctcgggccacgtgtttccaaatatgagtgcacaaaggtgagttctttactctgatccgtttgttcttagcgctggaaacggtatgcaacaacgactcgtcaagatcacagtcaacggggagcggtacagattgcaggacaagggacgtggtcataccgaaaagcatttttttatttaaccgctttgcttcttcaatgcagcgcgcgattgtctctcgtttacgctggtccaagctctcggacatggaaggcgtcatcgcactgtccgatccgctactcacggcggttgcgggcggaatcatggactccgtttcccagtcctctggaggcaaatcatacgccgaaaccggcatcattacaggtgcagcacgatttataccattgctatttactccattcatgagcccaccatataggcacgcaaatcacgaaggaagccaaatcggggtatgtggttccagcttcgccgcaatgctgtaaatgtggataacttgctcgacaatcatgccgatttgacagcgtaactgtatttgatatagttacagtatcgatactgtacacagtacagttacagttgatttggcaaggaggagtccgtgaacggagactattcactagcagtgcacgcgctggtctatttggatcaccgcaatacgcacctgcccagccagatcttggccgagaacatctgtaccaacgcagctcgcgtgcgcaaggtgatgcgcccgctggccgcagccggtctcgccgccaccaaggaaggcgccgagggcggatacgcgctggctcaacccgccgccgacatcacactgagcacagtggccgaggccaccggcaccacttttgtggacgcgaactggaaaccgggagatatccacgaggagtgcctagtgtcatcctccatgggtgcggtgatggacggcatttacgatgggctgaaccgcacctgcctcgagcagttggcacacaccaccattcacgacatcaccgaacagatcttcagcggcgctagcagccaagcaaactagaccgccccgatcagtttcggcccttcgcaattcccgaggaatgcagtagcatcacagcccgctacgcacctgcaaatggtcaggttgcaacatccgcgaacaaggaattcatgccggcaccagcgcaccgcacgcaccgcagaccccggcatcatcgcaacgaatcacacggcgtgcgccacaactcagcacgcctacgccacatacaagggaacaccgttgaccgcgaacacggtcgccccccccccgcaaattgttcacacctcacacaaggaagcattccatgaacaccaacaccactttctcccccaccatcaccacagatgtcctgattatcggattcggcaaaggaggcaagacattggcggccaagctcagcgcaaccggccataaagtcgtcgtcgcagaagcgagcgccaacatgtacggcggcacctgcatcaatatcgggtgcctgccatccaagtcgttgattctttctgccgaacaggcgaatcgaaccggagaaagcctgacgaccgaaactcgcgagacggcattcaagaacgcaatcgcagaaaagcgccgcgtcacctccatgctgcgagacaaaaattatcacaagctcgccgaccaggacaatatcaccgtgctgaccggccgcgctcgattcatcggaccgcacagcgcggaaatcgccactgccgatgggccagtaaccgtaaccgccggcaaaatcttcatcaacaccggcgccacgccgcacatcccggacattcccggcatccgcactacacccggcgtgtacaccagcactggtctgatggatattgacgagattccacaacgattggtgattatcggctcaggtttcatcggactcgagttcgcctcgatgttcgccgacttcggatcggcggttaccgtgctgcagcatagcgccgagttcctgccacgcgaggatgcggatatcgccactgcaatccgggaacagctgggggcccaaggcgtcaaattcctgttccatgcagagaccaaagaaatcgcaccggcgagcgctggcggcgtccgactttccgtcgcggtaaagggctcgacaaaagccacaccagagaagaacgcctcggccaattccacgaccacaccactgcaggaaacatgcgaagcagaccaactgacttcagccgcccacccttccgaggctcaattctgcctgactgcggatgccgttctggtggccaccggccgcacgccaaacatcgaaggcctgaatctcgaagcagccggcgtggagctcaccgaacgcggcgcggtgaaagtggacgagttgctgcgcaccaccgcaccggatatctgggctctgggcgacgtgaacggaggtcctcagcatacgtatatctcgctggacgattaccgcgtggtgttctcgcagctcaacggctccgaccgcccatacacggtgaacgatcggaagaacataccgtcgagcactttcctgcacacgccgtattcacgcgtgggcctgaatgagcgggaggcatcagccgccgggcttgattatgtggtcaagaaactgccggtggccgtcgtgccgaaagcgcaggtgatgcgccagccggagggtctgatgaaggcgattgtggagcgcggcaccggccgtatcttaggtgctatgctgctctccgccgaatcgcacgaggtgatcaatatcgtcaaactagcgatggacctcggcgccccggccagcaccttacgcgacatgatcttcacacatccgaccatcgccgaagcattgaacgacttgttcgcgtagtggctatcgcccatcacccagcatcccacccagtgcgatagggtgggatgcatgacgattgttgtatctactgacggttccgcactcggcaatccgaacggaccgatgggctgggcgtgggccgatcacgacaagaacgcaggcggtactgccggtcatgagcatgacgatcacggctatgacgccggtggcgccaccaacggcaccaaccaaatcggcgaactgtgcgcggtgctcgaggcgctgcgcgcgcaccccggttcagagccgctgctcatcgaatccgactcgcagtatgccatcaactgctcaaccacttgggtcaagggttggaagaagaacggctggaagaactcgcagaagaagccggtgaagaacgtcgagctcgtcaaggctatcgaccgcgagatatcgcagcgccccggaccggtgaacttcaagtgggtcaagggccatgccggcaatgaaggcaacgagctggtcgacgagttggcacgcacgtacgccggagactgccgttcgggcgcacgcgatggctacctgccaatcgagggctggcagtcgctgctaggttctgaatacgcgcgtggcaccgacgtgccaccggacgtgcaattggtactggatggcaaagcggatgcgacaagtctgcgcaagccggtcgcagccgaccccaataccgcaccgggaggcaccccccaccaagtcaagccttcattggaagaattactgaccgagccggagggagtgccggattggggcgacgacacgcctaccgccgaggcgcccgccataacaattgacgagaagtccgtcagcaacgcggcaaccaacgatacgccacgtaacgcaacgtcctcacccaatgcggcacaatcgccggcagccgaacaaactccagctgcatcaacatcaacagcaacagccaccccgactcccacgcagccggcacaaccagccgcgaccaccccaacggccacccccagcggtctgacggtttcaggtgccttgcgcttctcccccgcgccgaaaaccagcccgtattttaacggccagcccatgcccatcagaggcagcatcgaggtgcagggatacgtggacggcgacggcaacttggtcatcaccaatgcgccattcacgcgacactaacactgaaccacacgaatacataccgcaatcggacacgatgtcacaaaatcgctcattcgcgttaggataaggagtaaggcttcacgccgttaatccatgcggcggaagcaaggatggcaaaggagaaaccatggataaggcacagcaggatgcgctgaagaaggcggccggcatcgaagccgccaagctcatcgaagatggcatgatcgccggtctcggcaccggttcgaccgttaagttcctggtagatgagctcggccgccgtcatcaggaagaaggcctcgagttcaccggcgtgactacttcccgccgtacccaggctcaagccgaaagctacggcatcaagatcgtggacatcgatgacgtggaccacatcgacgtgaccattgacggcgctgacgaggtcgacaagaacttcaacggcatcaagggcggcggcgctgccctgctgtgggagaagatcgtggccaccaactccaaccagatcgtgtggatcgtggacgaatccaaggtggtggacaccatcggcaagttcccgctgccggtcgaggtcatcccgttcggcgccggccatgtgatcaagaagttcgaggagcgcggctacaagccggtgctgcgtcttgacgccgaaggcaaggaagtgcgcaccgacgagaacaacttcgtggtggatctgcacctggagcgcatcgatcacccgcaggagctggccgaggacctcatcaacacggtcggcgtggtggagcacggcctgttcctcaacatggtagacaaggtcatcgtcggcgacccgaacggcccgcgcgtgatgaccaacgccaataagtgatcgttcgcatcactcaagcttctcaaggccgcatctgcatctcgcaggtgcggctttgttgtattgcacgaaccaactttcgtctcgccgcatggcaggaacgcaccggtcttgacggcatcggagcaaaagagaaaccccgtgaccgtaacgatcgcggggtttccaatgccttgaatgcaggtaagactacttgcgctggtggcgggtcttacgcagcagtttgcggtgcttcttcttgctcatccgcttgcggcgcttcttgatgacagaacccatctgaagcctccattccgattaatcgtaaaagttgcaactcgcccaatagtacacgtgttgccagacagagggaacacgcacgcacaattgcgcaacccaccggcggcgacaacggcaatcaccggcatatttgcgcaatacgttgcgctttacagcgggaacttctggtagaaacgctcgacggcggccttggcaccggtggcccggaacaccacggtatcgttctgccagatagccacggcgttcttgccgtccaaggcatccaccttaaccgtgtaggaaccggtggtgctgccggagaccttcacattgccggcagccaattcatcaccggtctgagccgaagcaagagcgtcatactgggtcttggcattgtcggaagcggaccactgagcaataatcagcgtcacatccttggccttgtctccggtggaatatgtaagcgtgtactcttcgagcggcgtggcagcggtccaagtggtggaagcctcggccttggtgcgcgcatagttcaacacgctatccggcatggccttcagcagttcagtggcatcatccggcaaagccgtggcctcgatggtcggcttggtgggctcggccgatgcggcggcctgctgcttgccctgaacactggtttcgtccttcttaatggcccaacccggccatacgaaagccgaaagcactgcaagaataatgacgaccgcagcggcgaccactactgcaatcagcttgccatgggactgcgtagacgaagagttctcagtattagtcatggctttgattctctcacagccgcgtgacgctggcgactatgtcgttcctgattgaggtgaatatatcgtgaatcggtagaaatctaccgctttgtatatcaccggctactgttgaaggcatggcgaaatcaagtgtgcagtacgtgtgttccgaatgcggatggaacggcccgaagtggtatggccgttgccctgaatgtgggcaatggggaacggtcgaggagtttcatgaagcccgtccggctgcgggttcacacaccgctgcgcccgggcggacatcacgcacacgatcggcggccgtgccggacaccgcgcgtgccgcagccaagccgattaccgaaatcggtacggaaaccgtggaacgcttgggcacggggttttccgaattcgaccgtgtgctgggcggcggcgtagtgccaggttcggtaacgttgattgccggtgagcccggcatcggcaagtcaacactgctactgcagacggccggtaatatcgccagggcagtggctgaaggccagacaatcaacgctgctgggagaggccaatcatcgcatcggtcttccggattagcctcgactcgcgctcacacggtgctctatatttccggtgaggagtcacaggcacaggtgcgtctacgcgccacccgcattaatgcagtggaaccgaatctactgcttgccgccaccaccgatctggctaccgtattgggcttaatagagcagaacaaaccggcactggccatcgtcgattcggcacagaccattgtttcgcaggaagtcgatggcatctcgggcggttccacacaggtgcgagaggtggcaagcgccctgatcgacaccgccaaaactctcgatatccccgtgtttttggtgggtcatgtgaccaaggacggctcgattgccgggcctcgtaccctcgagcatttggtcgacgtggtctgccagtttgagggagacagcgaaacggccctcagaatgctcagagcagcgaaaaaccgttttggcccgaccgatgaggtggggtgcttcgacatgagcggcgaaggcatcgaagaagtcaccgaccccgccggactgttcttgtccggagatggcccggaatcagccaatgacgctcccgtggagggcacatgcgtgacattcacgctggacggccatcgcagtctgcctatcgaagtgcaagcattggtcaccaattcagtgctgcctacgccaaggcgtgccgtcaatggcgtggatcccagccgcattgccatgttggtcgccgtgctgtaccggcacagcaaactcaatctgctttccaacgatctgtatatttccaccattgccggaggtcaggccaaggagcccggttcggatctggccattgttggagcgctggcaagcgcggccacaccgaagccgattgcccgctccacctgtgccatcggagaaatatcgttgaccgggcaggttcgtcccgtaccgcgtatggaatatcgtttgcgcgaggcagcacgcctcgggttcactacggcggtcattccacccttgcgcaaaccggtgcatgttgatgggctgaaactcgtcgaggcgagcacgcttgccgatgcgcttcatgcattaggcgtacggaagtaatgggcagtatcaagcggtaaggcgcttggtttcctccacattgcgtttgagttccgcaaccagctggtccggtccatcgaacttgacttgggggcgcaggaaacccacgaattccacgcggacattgtgcccatacaggtcgagccagtcgccggtgatggcatatgcctcgaccacacgctcgtgaagtccggtcttctcgctgaaagtaggcttggtgccgatggaaatggcggcaggccaacggttgtcgccatccaccagccagccggcatagacgccgtccacaggaatgtatccctgtgtttccgagccgagattggcagtggggaatccgatggtacggcctcgctcctcgccgtgcaccactttgccttcgatggtgtgcggcacgcccaaaatggcgttggcgtcttgaatgcgcccgtgggcaagcagatagcgcacattagtggaactccaggcgcgcatggccttggcttgattcttcttgctccaggcacggcgctcggccttggtggcattggccaacgggtcggcaggctcgccccattcggtcggggcttcgggccggaaatcacgcggaatacgcacttcgccaggaccacggtcatcaaccacatcaagttcaaagacaccggtggcggcggcgaggttggcgatatgcttgacatcgcctgcgcgccccttgcccatggcggcgtcctggccaagtaccaacgtgcgcatgccgagcttgccggtcagctggccaaggaaaaagatgtaggacttatccgcaaaagccagcgtgtaatgaaccaccaatacatgatccacgccaaactcttcaagacgacgcagacgctcgtcaatgccggtcagcgcatcggcatccacactgctctgtgtcggttcctcaccgttgtgcgcgccggcccagccgtgcacgaacgcaggacgcggatcaaacagaatgacgatggaaaacgcgtcatgccgatgagcgagttccaccacacggttgatcacggcctgatgacccaaatgcatgccatcaaatgcgcccagcgtcaccacggccttcttgtcgttgctgaacgaaggccaagcaatcgagccttcggcgtcaggagtcaagtgcgtgatttccataagttgtgtggttcctttattcgtgcattcaatcaagtctcgctgtacgcgagtttacgcgagggggaatacggtgatcggcttggcctgatgcccattcgccctctcgatgatggccaccacatcatgggtttgcggcacgatggcggcggcaggctcatgaatcgtgcgctcgatgcgacgcccaaaacgcagctccgcagcttcctccggcgtaatgtcaagagcgggcatggcgctgcgggcggcctgttccatggtcaatgagcgaccaatcagccatgcgcatcgaccagcgccgtcaagcccttccgggatgtcgagcacgcacttattgcgagtgatggtttcgccttcgcgattggtaaacgttttctgctcggtatgagccgtgaccgtatgggtctgcgtctcgctcaccgcatcaggcgaaagaagcccgctggtgtcgtccggcagagcgaagttgccgactctggtgcggcgcaaacgggtcagataaccaccgacacccaacttgtcgcccaagtcacgggccaatgcgcgaatatacgtacccgacgagcagctgacgcgtacatcgacgtccaatactgaaaccattccgcgctcttgcaacgcttcatcagactgcttccccgtcacgaatccactgcgagtagccagcacagtgaattcgctgatagtgaccggacgtggcttaagctccacatccttgccttcgcgggccaagtcataagcccgctgaccattgattttgatggcggaaaaagtgttgggaatttgctcgatatcgccggtgaagttggcggcgatagtgcgagtgagtagctgctgccacgaggaggctggcaatgatgatggttcctcgctatgaccaccttcagtcagctgcgacgacagctccagccagcgggagcggacttcgtcatcgacaagcacctcgccttcggcatcgtcggtggtggtgcgcaagccgagacgaatggtggcctcataggttttatcatgtgcaacgatggcattgagcagacgcgtggcatggccgaatgcgatgaccaacgctccggtggccatcggatcaagtgtgccggcgtgaccgactttcttgatatgcaacgcgccgcgcacggcggccactacatcgaaactggtcacgccttgcggcttgtcgatgacgagcaggccgcttggagttgtttgaggcatatgcggtgttccctttatccatgccttcggcatggtctctccctccgccccctttggggcacctccctcgtcagagggaggttgcggggaaactactcttcgtcggaagagtattcctcatcgttgaggtcttcatcttccggctcgtcgtcgtgcttataggggtcggcgtcgccggcgtagtgagcggtggcgcgggcgcgcgcaagatcctcatcgcgcttcttggccatagccaaaatatcttcgatctcgtgggcctcgccgggcacttcatcgaacacaaactgcagttgcggggtcaggcgcaagccggccttgtggcccaccaaagtacgcagatgtcccttggcctgatcgagagcctgctgggcacgcttacgttcgccatcctcgtggccttcatgaccaagctgggtccagtagatcttggcgatctgcaaatcattggtcacacgcacttccgtgacggtgatgctggacagtcgcttgtcgtgcagctcatgctcgatggacgaggcgaccacacgctgaatcagagccgcaatacgcgcggcacgtgggttggttcctgccatgggaatttccttttctgtcgtgtttctagctccccctcctagggggaagctgtcgtcgttagacgactgaggggctgagccgttaagcgaacagcccagtgggctgttcgtaggcgaagtagcggcgatagccgccaatcaagtgaatacaaaaatagaggaggcatccagcaaaaaccggagccccctcagtctgcttcgcagccggctccccctaaaagggggagccgataaaagcgaggggctctccttgaggagaaccagaatgactacttgcgctcgacttcctgcatctcgaaggtctcgatgatgtcgccaagctcgatgtcgttgaaggtgccgaggttgataccagcctcgtagccttccttgacggactgcacatcgtccttgaaacgacgcagcgaagaaatctcgaggtcgttgaccgtggccacgccattgcgcagaatacggcacttcgtaccacgcttgacctcaccgtcctgcaccataacgccggcgatgttgccgaacttggaggaacggaagatctcgcggatctcggagtgggaggtgacgacctcttcgtattccggcttgagcatgcccttgagggatgcctcgatgtcttcgattgcgcggtagatgaccgagtagtacttgatctccacgccctcgcgctcggcgaggtccgcgacctgacggttcggacgcacgttgaagccgatgatgacggccttgtcgaccgtggcaaggttgacatcgttctgggtaatcgcgccgacgccgcggtggatgacctggatgccgacctcgtcggacacctcgatcttcatcaaggaatcctcgagcgcctcgaccgaaccggacgaatcgcccttgatgacgatgttgagcatatcgatctcggactcggcgaacttcttcttgaagtcctcaagggagacgaccttgcgacgcttggccagctgagcagcgcgctcggtagcctggcgcttctcagcaatctggcgggcggcacgatcatcggaagccaccaggaacaagtcgccggcggtgggcacggaggtcaggcccagcacctggacaggcgtggacgggccagccgcatccatggcacgaccgttttcgtccaacatggcacgcacacgaccatacgaggtgccggccacgatggcatcacccacgtggagcgtaccggactgcaccagcacggtggccacggcaccacggcccttgtcgagtcgggcttcgacggtggcaccacgggcgtccatgtcggggttggcgcgcagatcaagctcggcatcggccgtgagcagcacggcttcgagcagcttatcgacgttggtgccctgcttggcggagatatcgacgaacatggtgtcgccaccgtactcctcaggaacaagaccgaactcggtgagctggccacggaccttctccgggttggcaccgggcacatcgatcttgttgacggccacgacgattggtaccttggcggcctgagcatggttgatagcctcaacggtctgaggcatcacaccatcgtcagctgcgaccacaaggattgcgacgtcggtaagctcggcaccgcgggcacgcatagcggtgaacgcctcatggccaggggtatcaaggaaggtgattttgcgaggttcgccctcaagatccaccgtgacctggtatgcaccgatacgctgggtgatgccgccggcctcacgtgcgatgacgttggtcttgcggatggtatccaacagtcgggtcttaccatgatcgacatggcccatgacggtgacgaccggcggacgaggtttcagatcctcatcatcctgcagctcttcctcgtcaaggttgatgtcgaactgctgcagcagctccttgtcttcctcctcggcggaaacgagctggatgttccagccgatttcctcacccaggatctggaaggtctcttcgtccagggactgggtggcggtagccatctggcccaggtggaagagcacggtgaccagtgcggcctggttgacgttaatcttctccgccagatcagccaaggaagcaccctgacgcaggcggatggtctggccgttgccgttggggatgcgaacgccgccgatggtcggtgctttcagctcctcatactcatgacgctttgccagacggttcttacgggccttagaggacttgccgccctgacggccgaaggcaccagcagtaccgccgcgaccaccgcggccaccgccgcgtgcgggaccattgctcggggctccgccgccctggaagttgttgccgccgccttggccgccacggaatccaccgcgagcgccgccgccttgtgcggcaccgccctgacccggacggttatgaccccattggccgggacgaggaccgccctgaccgccttggcccggacgaccaccgcggaatccaccacggccttgaccctgaccctggcctggacgaccgggacggccgccacgaccaccttcagtggtcggacgagccatcggatgcgggcgcggaatatcgcccggagtcggagagtgcatgccctgcttacgggagaacgggttattgcccggacgcggaccctgcgcatgcgggcgcggaatcgcgttggaagcgttgcctccagcagtcggacgagaaccgccctggccaccacggttgttctggtgctgaccgggctggccaccgttcggacgcccctggccctgacgattaccgttcggacggccttgaccctgacggctcggacgaccgccgttatcgtgctgattattgtgacgtgcgggggccggagccgcaggacgttccgcctgcgggcgcgggcccggagttgctgcagccggtgcggcaccctgatgtgttgcagcggcagccggcttgtgctgtgccggcttggccgcaggcttctgcgcagaagccgcgggcttggcatcgcccttatcgtccttgtcgaacgcggccttcagacgacgtgccaccggcggttcaatcgtagaggaagcggacttaacgaattcgcccatgtccttgagcttctcaagaacggtcttgctatcgacgttcaagtccttagccagttcgtatacgcgtggtttcgccactaattactcctatctgtgaccacgcgtacatgggcgtggtcagttggtgatgacggcaagcctaccctgtctcatcgtgcgaccatgatcgtgttacctcgtctctggtgtgggagattttgcgcacactgcgccaacccacatacgccaatccagcatactcatagcgctggatagcacggaatagcgcgagccgcgtcattgttgacgcggctcgcaatgtatatccgccggctactcggaatcattcgatccggaagccgggctctcccaagctattcggcctgtgctgcagcctgctcggcagcctgttcttcagcgaccttcttggcatgcgcctcggcggattcgatgccgatcttccagccggtgagcttggcggccagacgggcgttctgaccttccttgccgatggcaagagacagctgatcatcgtggatgaaagcgattgcggtcttgttcttctcgctgatcacctgtacgccggtggccacggccggagacagcgcggcagccacgaacttggccggatcatcggagtagtcgacgatgtcgatcttctccggtccgaggttctccatgacggcacgcacgcgagcgccgctggggccgatcagagcacccttcgggttgacgccatcggtgttggccttgaccgcaagcttggtgcgggcaccggcctcgcgggcaatcgccatgatggacacggcaccggaaaccagttccggcacctcgcgttcgaacagcttgcgcaccagttccgggtgggagcgggagaccacgatttccgggcccttgatgccgcgggccacattcactacgtatacgcggatgcgttcgccgtgacggtagcgctcacccggcacctgctcgcggcgaggcaaaatggcttcgacctcacccatggcaacatgtacgttggtgggatcggaagcatcctgctggatgatgccggtaaccagcttgcccttttgtccggagaaggcgccgaacaccttctcatcctcgactttgcggaacagttgggtgatgacctgacgcgcggttgcggcggcgagtcggccaaagtcgtgcggggtgtcgtcgtattcctcacccagttccggcgcggggtgcggatcgtcttcagtgggttcgaccggaatatcgtcggccgcccacacagtaaaactgccggcgcgctcatcgagttccacacgggcgtgcttggccgcatgcggggtcttgaggtaagcaagacgaagagcctctgccagcgcatcgtccaaggtttcggggtcgattccttgctcggcggcaagcttatgcattcctgtcaggtccagttccatcgatccgtacctcctatgaagttatgtggcgaatggccttgagtggtcacagttagctattagtgtagatttccatgcagacacgctcccccttgactggtttccgccgactcatggccggcgtatgcgcgggtgcgttcatatgttcgctttccgcgtgctcgatgcctcgattggcggaccgagccgaagcggaacgaacgatgagtccctgcgagagcgcgctgacgttggcgaactttgccacgactccggccaagggcactccgctcatggtgcagtacggtaacggattggccgctcccctggcatggatcgatgttgccggacactgttccgggcgctttgccgaaggaacgttgcgcaacgcccagaccaagcaacgattgaccgtgctggccggcaaattcggacaaagcgcgccagaagtcacgccggcccgtcttgatggcatcacttccgcaaccatcgaccgatcggcattggatgcgatggctattgccgaggaccgcgccggatttgccctcgaagtgttggccgcccgcggggtgacagccggtgcaacactcacattgagcgacatgcataagaccgccggacagcagttggtgtcgctggcgaataagcgcttcagcgattctggttcaactgccgacgccggcgacagccaagacccacggcaaaaggtctatgccatcgaccagttgctggccaatccggctaccatcgaagacaaggccagcgaacaaaccgtgcctacggcttccgccatcgaaatggattgcgcccgtgccgaaatcaaggccgtggccgattccacctcccaatccgacagcgataccttgctagtgcttgccgccctggccgccaagcatgcatacaccgcattccagcttggttatccctccggagactccgctttgtttgcgtagggatatagacggcacaggcagatcgcccgattacgcgcaaaaacaggaactgcacgttaccgagcgagcttggtcgaggcacgctccaccacggtgaaatcggtggtgtaggtgcgcgccggcccggaatatccttcaatgcgttcgataagcatatccacggcatgtttggcgtaatcatccacatgcggatcgatggtggtcagcgccggcaccgagtactcggattccggcacattgtcgaagccgatgagttgtacatcggccggtactcgcagcccgcgccgctgcaattcgtgaatagcaccgagcgcgatggcatcgttaagacacagcaccgcctgagggcacggcaacgaatccagcatggatgccgcggcctgcacaccgccatgctgattccagccgagcagaggaatgacataccgccaatccacggtcaaaccgcgctcttcatgagcctgcacatacccctggatacgcagcgactgcgtgccgtcgcgctgatcgtgaacgtcctcccaaccatgcatgccgggtaaggcgccgataacggcgatggttctcacacctgtgtccagcaaacgcccgaccgcgaaccgcaccgcctcggtgttcggcatggtcacctgatcgcatttcccatacgacaggtagtcgccgcccaacaccaccggacacggctgctgaagtacctcacccttgttctccagcgcgcgttcggtaaagaaaatccacccatccgcacccagccggtatgtttcctcgatattgtcggccagacccatgccacccgagccataggtattgatgatgacgccatactcgcgttgcttggcgaactcgatgacaggcaatgcggctaccgcaccaacgcaaagcccccgaagtgcaagacttcgggggcttggttgcggatgaagcgagattcgaactcgcggaggctttcacctcacacgctttcgaggcgtgctccttagaccgctcggacattcatccatgctgcccaaaaggcaacttgtttattatgccacattccgacgacgcggcaagtcggggttttgcgagtctacgccacctgttcatgcacggaggcattgacccattgggtctgctggacgttgtagccggagaatataccgatgtcgagcatgcagtcgcggtagtcgcggccgtgggcgatggtgatgtagttgtcgtccaccaaacgattatgcgtgggatccaagccgacccatcggccatcctgatagacctcaacccaagcgtgagtggcgccttctcccccgagcagtcctgcaatgtaccgggcagtcaggccgacatgccggcacacggacagcatcacatgcgcatagtcctggcatacgcctttgcgctgcgccaaggcctgttcggcggtggtgcgaatcgtggtggatccgggagtatatacaaaagctttgtacacctcgtccatcacttcggcagcctgctgcaccggcgtagcatcagcaggcagcgcggcaagacgatcacggcatacagcaatcatagcctctacgtatgggccaggaatggtcagcgcagaattgaaccggtagagcggcttgtagatttccttcttgatgtgttcgttgtctacaaaggcgatgccggtcaccgaatagctgaacgtgtcgtgcggctcgggcacaaagccggtcatcaccacggaatcaaaggaatcgatggtggtttcgagttcagtctctggctgaatcttcacttcgacgtcaatcacttgctggcgcggaccggtggccggtatgcagcgcaactggaacctgtggtcggtgaccggcgagctgaaggacagcttcatctcatagtcgaacacgagttttttcacgacgtctcctgcacaatactcacgcaccagcggccggcacatttcgggatagcagcactacagatacagtggccgccgcacccgctcgcaaaaatgtagcgggcgcatacggcttgaagccataccaccataccattgcaacctgtcaggggcgcttggcatccatgttcatggagctgagcgagcccatgtccttgatggccaaagcgctgactctgccggaataatcgtcaaggtacttcttcagagaatcggccacctcctgatatccgcgagacggcagctggccgacaagccaactcagtccgtcggcgaaacagctcggcaacggcataccgtcgagaatcatcgaataggaggccagcttcttcagcggggcttccatttcttccatcgtgagcccaaaacgggtgtacaaatcgatgcgttccagatacttgccgatgaagataaaggcctttagcgtgggatcgactggcgaattctcgatgccgccccagaaggcgagcatgtcatcggtgatgtctcgctggttgtagatgtcctcggcatcggctgcatgcttggcggcatctgtaatgttggtcatcgccagttcgacgtattgcagcagtcgggagctcagttccgggcgcagaatcacggcattgttgaacgcggaagtaactgcggaacgcacggagtccgggttcgagccgtcgtacaggaagctttccacgaacccatcaaagtcctcgaagtcctcgggcagatcgagggcatgagcgaagggccggaaggcgtctacatcagtgtccatcacacggtcatagaacgggaagaactggttcagggtggtgaaggcacgttcggtgtatcggcccaaccaatacagattgtccgctttagaagcggtgaccaaggccagcgaatggtgacgcgactgactcagcaggttcgccatctgcacctctgtatcgtattcgtgttccactccggtctccggcgccaacacccacgtatccttgaatccaccgccctgcgacgagttgacgatcatctggccaggcacggacgaataacgggtcaggcccgaataccacacatgcgtgttcttgccggtcaccacgaaggcgcgcagatcgcatttgcgcggcgacatttcgccggtcttcggatcgaccacgtcgatatcgcggaactgaatgacctcctgtgcaatgaatcgacgtggctcctccttaatgcggtcggccagttcctcacgtgcggcggcatccagcgacgagccgaacaccacaccatagccgccggcctcggccacatccttaatcaccagctcgcccatacgattcaggacttccttacggtcggcctcaaacataggcatgtaggtgggagcgttgtggaggatgggctcttcgccgagatagtacttaatcatctgcggcacgaagtagtagatggccttgtcgtcggccgcgccgttaccgggagcattgacgatggccacattgccggcacggtaggcggacaggagcccgggcacaccaatcacggagtcggggttgaaggagaacggatcgaggaactcgtcggagagacggcggtagaccacgcccacacggtgacgcttgccggcgtaatccaagaaatagaccttgttgtccaccacttcaaggtcttcagggaaggcaagtgcggcaccggttttctcagccaagtaggcatgttcgaagaacgcggaattgtatcggcctggcgtgaggaccacgacgataccttcagtagagacgaaatccatggctttgcgcagtagacgcggatattcacggttgtctcggatacgcacgtcacggaacagtcgtggagagatacggcgttcgatatcgcgtacgaacagcgggtagctggcaccggacggaatacgcaggttgtcttccagcacccaccagcgaccgtcctcaccctggaccaaatcctcaccggcgatatgcgcgaaaatgccaccgggaggggtcacaccgttgacctgcgggaagtatccgacagacgtgtagacgtattcctccggcaccacaccgtcatgaatgatggccttgtccgaataaatgtctttcaggtaggcgttgagtgcgttgacacgctgcttcaggcctttctcaagctcatcaaactcgtcggattcgataatgcgtggtacaggatcgtatggaaacaaacggtcgtggtattcgccgttcttgtagatgccgaagcgcacgccgttgcgggacagctcacggttgattgcctcacggcgattcaccagttcgtgggccagtcggcgtgccgcggattcaatcatcgtacctgctccttgctctgacggctgcaggcttgccatgcttgaggcgcacgctgacgccgcaagccgcaaccgggtttgatggtttcaacctaggcggcacccgtttcagcaaatgtgcgggtttgttacgggcaggtcacttgcaggtccatgaaatctacaaagtacgtacggcacgaatggcttcggcacgagcagccaactggtcatccgccggatattcgatatgttccagagtcagcccttgcggtgcgattggcccgcttgacccctctcgcaccggattggccatcttgtccgcaaaccattccagcgttttgcgccccgaaccaaccttgatcgaggaaccgaccagcgaacgaaccatattgcgagcaaaagcatcggccacaatcgtgaatacaaccaagccggattccagcgacggcgtccggtatgcctcgttctcagccaatacgtctggcaccaacgaggcaaccggcactcggcgccagtaggccgtcttgacttcacgaatcgtggtaccacccggattcggcgtggcaaacgaaccaaaatcatgcaggccaatggtcatggcggcagcggcattcatcgcatccaaatccagcgactcatccacgcgcagtacacagccgcgcagccgggggtccacttcggatgaacggtcggcaacacggtacacatacgtgcgctccaacgcggagaaccgcgcatcgaatccctgcggcgcaatggcgatgccgtgaatcacaatgtcagcaagcagcacggccttaagcctgcgagccaatgcttcggtcagcggcacatccatatgcccttggcaacgagcaagtgtttcatcagacacatccagatgcgccacctgatgcgaagcgtgcacaccggtatccgtacgaccggccacagtcagtcgcagcggctctctctcgtcaccgaccggcacacgcagcaccttgtgcaacgcatcctcgatagttccctgcaccgtgcgcagctcaggctgcttggcccagccgtagaatccgccgccgtcataggcaaggtcgatgcgtagtcgtgtcatagtccatcatcttaatgatcacgatgataattcgacttttgatgcgatgccggcatacagagacgaaccagctatggtcgaataacgcaaagggctggaacccaaatggattccagccctttaagctagctatgcgacctagcggtcagctcactcggccttctcggcttcagcggcttcctcagcaggagcctcagcctcagcggcagcggtctcctcgaccggagcctcagcagcttcagcagcctcggtctcgacggccggagcctcttcctcgacaaccttagtggcggcctcggcttccttcacgacagccttcttggcaaccggctcggtgacgagctcgatgatggcggccggagcgttatcgccaacgcgcggagcgatcttgacgatacgagtgtagccaccttcacgctgctccatctgctcagcgatctgggtgaacagaatgtgcaccacagacttgttgcggatgacgcgcatcacgcgacggcgagagtgcagatcaccgcgcttggcgaaggtgatcaggcgctcagccagcggacgaagacgcttggccttcggcagcgtggtggtgatttggccattctggaacaggctggtcgccatgtttgccagcatgaggcgctcgtgcgcagggctggaagccagacgcgggcccttcttaggtgtaggcatgggtttactccttattgtccgaagcaggcaagcaggtgggcatgtgcccgagcatccgcttgccgtgcgaacagacggttaatcaaaagcgacgaatcactcgtcttccggcgagaagaaggtgccgccttcgaggttattggtgtcgaaggccatcggcgaagacttgaggctcagacccagagtctgcagcttctccttgacttcgtcaatcgacttcataccgaaattgcggatgtcgagcagatcctgctcggtgtgggagacgagctcaccgatggtgtggacaccctcacgcttgaggcagttgtaagaacgctgcgtcaggttgagatcctcaatcgggacggccatctcggggttggtttcctcggccaccggggccggaccgacctcgacgccttcggcctgggcattgagctcgcggcacaggccgaagagctccaccagggtcgaaccggcggaagccaccgcatcacgcggggagatggcgggcttggtctccacgtccagaatgagcttgtcgaagtccgtgcgctgttccacacgggtggcctcgaccttgtagctcaccttgagcaccggggagtagatggaatcgaccggaatacggccaatctcatcggtgtcctgcttgttcatctgggcaggcacgtagccacggccacgctcaacggtgaactcgatctcgagttcgccgtcctcggcgagggtagcgatgtgctgctccggattggcaatggtgacgccagacggcggggtgatgtccccggcagtagcctcgcccttgccgctcttgcgcaggtacatgaccacaggctcgtcatactcgctggtgagcacgatgcccttgatgttgagcaggatctcggtgacgtcttcctgaacacccggcagagtggtgaactcatgcagggctccggagatacgcacggaggtcacggcagcacccgggatcgaactcagcagcgtgcgacgcaacgagttaccgagcgtgtagccgaagccaggctcgagaggctcgatggtgaagcgagagcgctgcggattcagagattcctcggtcagagtcggacgctgtgcaataagcactgtggttatcctttcagcttgaactcggtggtgcactcaccggctaagcggttttggatggattggtattgctgagtgctcagacgcgacgacgcttcggaggacgaacgccgttgtgggcttgcggggtgacgtcggtgatggaaccgacctcgaggcccgcggactgcagggagcggatagcggtttcacgaccggaacccgggcccttgacgaacacgtcgaccttcttgacaccgtgctccatcgccttgcgggcggcggactcggcagccataccagcggcgtacggagtggacttacgggagcccttgaaaccgacgtcgccaccggatgcccaggacaccacggcgccagacggatcggtgatcgagatgatcgtgttgttgaaagtggacttgatgtgagcctggccgaccgggaccgacttgcggtcacgacgacggggcttacgagcggcttgcttaggcgctgccattgaccctcgtttcctagtaacgaacttatttgttgacgtccgaacgatgggatggaactcatcccgtggctcggagcatgccacctattacttggtggccttcttctttccggcgactgtacgcttcgggcccttgcgggtacgggcgttggtcttggtgcgctgaccgcgcacaggaagtcccttacggtgacgctggccttggtagcagttgatctgaatcttgcgacgaatatctgcatcgatttcacgacgcaggtcaccctcgatcttgtagttagcttcgaggtagtcacgcagcgtaatcagctgctcgtcggtaagatccttgacgcggatgtccgggttaataccggtcgcggcaagcgtttccttggcacgagtacgaccaacaccgaaaatgtaggtgagggcgatctcgatgcgcttctcattggggatgtcgactccggcaagacgtgccattgcgattccttcttgttgccgtaggtcttgcacccactcgtccggtttcccggcacgggcctacgtacccgtggttcagtgtcgttcccttgcgggaagcactgtgagagagtgccttatttacttagtgccgctggagaatctgctctcagccctgacgctgcttgtggcgggggttgacgcagatcaccatgacgcggccgtgacggcggatcacgcggcagttttcgcagatcctcttcacgctagggctgaccttcatggttatccttttcttgtgtacctttacttgtagcggtacgtaatgcgtccgcggttcaggtcgtaggggctcatttccagcacgacacggtcctgcggcagaatgcgaatgtaattcttacgcatcttgccggaaatcgtggcgagcacgatgtgcttgttctcgagttcgacgcggaacattgcgttgggcagtgcttccactacctgtccttcgacctcaatcacaccgtcttttgccatgcgcctctagtcctattccgttggatgattactgtggcatatccgaagacacaccaactgtcaactatatacgcacatacccctatgcgacactcggcgtgtcgcataggggtatgtgcgaaatgttgtggtagccgctaggcttgccgcctctactgcaggtggctgatgatgcggcggctgatctcgtcgatgtcgccgacaccgttgaccacgaccagcagaccgcgggactcgtagatgtcgagcagcggggcggtttccttctcgtaggtttccaaacgcttggcgatggcctccggggtgtcatcagcacgaccctgctcggcggcacgcttcttcatgcgctccagcagcacgtcacgggcggcttcgagagccaccacgtggtcgagcggagtgccgaggtcggccagcatttcgtcaagtgcggtgacctgggcggcgttgcgcgggtagccatcaagaatccagccgttggcacagtcttccttggccagacgatccttgacgatcttgttggtcagggaatccggaaccagctcgcccttatcggtgtagctcatcgcttcaagaccgagttcggtcttgttcttgatgttgtagcggaagatatcgccggtggagatggtggggatgttgaagtgctcagcgagcagcgcagcctgggtgcctttgcccacgccttgaggtcccatgatgagcagacgcatggtggtctccttttatgttggaaattaatacggctttggttcccttgttaagggaaccattgagttatatgtgggaggaaacggattgctccgtcagtcgacagcccacagggctgtctccttcctcgcgctgacgcctgctgagcgggcgtcagccttccttatgatccacgttctcgagcaggaagccggtgtactggaactgctcggtctgggccttggcctgacgcagggtgtcaaggccgacgccggcgataatcaggatggtggtaccaccgaacggcagcttggcattgagtccgagggccatgatgagcacggtcggaatcagggccacgaacagcaggtagacggcaccgacggtgttgagtcggttcatcacgtaggtcaggtagcggctggtggcgttgccggcgcggatgccggggatgaagccgccgtactgcttcatgttgtctgcggtctcgtccgggttgaacgtgatcgaggtgtagaagaagcagaagaacacaatcatcagggcatacagcgcgatgtaccacaccgaagtggtgttcgcgagattgttgttgatccacttgacccaagactggtcggacttgccgaactgggcgatcagggtcgggatggccagaatcgaggaggcgaagatgggcggaataacgccggacatattgatcttaagcggcaggtaggtggaggagccaccgtacatcttgcggccaatcatgcgtcgggtgtactgcaccggcacgcggcgctggcacagttccacgaagtcaacgaagatgaggatgaccacgagcacgcccacaacgatgccgaacttcagccaatcgccatcagtgccgttggtgccgtagccaatctcccacagctgcggcaggaagccggagcatatggacatgaagatcaagatggacatgccctggccgatgcccttgtcggtcacaagctcggccatccacatgatcaggccggtgccgccggtcatgatcagcaccatgaccacgaggttccacacggagccgtccggaatgacctggtcacacttgtagttgaacagggcgccggagcgagcggtgaccaaaatggtggtggactggagtacagccaaaccaatggtcaggtaacgggtgtactgggtgagcttggcctcaccggactgaccctccttgtgcagggcctcgaagcgcggaataaccacacgcagcagctgcacaacgatggatgcggtgatgtacggcatgacgcccagcgcgaagatggacagctgaagcatagcgccaccagagaagaggttcaccaatccgatgaagttctcctgtgaggcgctaccagtggtggccatgcacttgttcaccacgttgtagtccacgcccggcgtcggaatgaacgaaccgatgcggtagacgatgatgatgaacaggacgaagagaatcttcttcctcagctctttggtcttcagggcctggattagtgtcctcacctgggtttcctcccactagcgcgcactcgacgcgcgaaatacacaaactatcgaacgagcatagtctaacgtgcctacttcagacaactgtgcgtctcgtcaatgcttgctgaatatgactttatggacaacgcatctccccgaaaatcggggtattgtatcggcgccagcgaatgtaggacttgatgttgagaccgcatcactgcgcgcggaacgccatcaatgatctcgataggtcatagtgatagcagtgcccccgaccaccagataggcggacgggggcacagagctatattcagcgtttcgcgcggactaatcagtcctcaacgacggagccgccggcagcttcgatcttggacttggcggaagccgaggccttgacacccttgagggtgaatgccacggtggcttcgccttcgcccagaaccttgaccggagcgttgccacggacgacgcccttggcaaccagatcctcggcagtcacttcgccgccctgagggaagacctcaacgagacgagcaatgttgaccacctggaactccacacggaacgggttcttgaagccacggagcttcggcaggcgcatgtacagcggcagctggccaccttcgaagccaggacgcacgtgagtgcgcttggtctggcccttggcgccacgaccggaagtcttgcccttggagccttcaccgcgacccacgcgggtgcggtccttcttggcgcccggggcgggcttcaaatcgtgcatctgcaggatttcgttatctgccataatcagtcaacctcctcgacggtgaccaggtgacgcacggcgttcaccagaccacggttggccggggtatcctcgcggatcacggtcttgccgatcttgttcaggccgagggtcttgatggtggcgcgctgagccggagtacggttcacgatgccgtggtgcagggtaatcttcaggttcttagccatgagtatcactcaccatccttctcttcagcggccttcttggcagcctcttcacgagccttgcgagcctcatcgataccagcggcacgagcgcgcagcagggcatcgggagcgacctcgttgagggccagaccacgacgggcggcgatctcctcgggctcttcgagctgcttgagagcatcgacggtagcgcgcaccacgttaacggcggtggcggagcccatcgacttggtcaggacgtcggtgatgcctgcgcattccatgacggcgcgcacggagccaccggcgattacaccggtacccggggcagcaggacgcagcagaacagtgccggcggcgtcgtgaccctgaaccgggtgggtgatggtgccacggacgcgaggcacagagaacatgtgcttcttggcgtccagctggcccttggcgatggcggccgggacttcacgggacttgccgtagccgacacccacggtgccgttaccgtcgcccactaccacgagagcagcgaagctgaaggtacgaccacccttgtgggtcttggacacacggttgatggtcaccacgcgatcgagcagttcgtcgccgcggttttcctcacgacggttacgacgctcgccacgacggccttcaccgcgctggccacgacgacccttgcggtcctcgttgttggattcggtcgccacagtgttctgagtttcttcagccacttgggtttccttagtttcgttgtcgctcacagtgcaagacctccctcgcgggcgccatcagcaacggctgcgacgcgaccggtgtacttgttgccaccgcggtcgaaaacgacctcggtgatgccggcagccttggccttatcggcgatcagctcgccgaccttcttggcggcctcggtcttggtgcccttgaaaccggcaaagtcggcctgcagggtggaggcggacacgagagtcacgcccttggtgtcgtcgaccacctgagcaaccatgtgacggttggaacgggtgaccaccaggcgcggacgctcggcggtaccggagatgcgcttgcggatacgcacgtgacggcgcttgagagcaaccttcttgccttttccgagaatagctacgctcatatcacttaccagcctttccagccttgcgcaggatgcgctcatcggcatacttgacgcccttgcccttgtagggttccggagcgcgcagcttgcggatgttggcggcgacctggcccacagcctgcttgtcgatgccctcgacaaccacgtggttggcgtcggtcaccttgaaggtgataccttcgggcgggttgacggtgatggtgtgggagtagccgaggaagaactcgatgccctgacccttggcgacggcgcggtaaccggtgccgacgatctcaagagtcttggagtagccatcgtgcacacccttgaccatgccggccatgatggaacgagccagaccgtgcttggcacgggtcggacgcaggtcatcagccggggtaacgatgatctcgttgccctcaacggcagcggtgatgccttccggaatcacgtaggaatcagaacccttggcgcccttggccgagaagttctgaccttcaatcttgacttcaacgccagcggggatggcgatggggagcttaccaatatgcgatgccatgtttcagctctcctttctcaccacacgaaggcgacaatttcgccgccaatgccccggtcgaggcattccttctgagtcagcagtcccgaggaagtcgagatgatggcgatacccaggccaccgagcggcatcggcagggagtcggacttcgcataacgacgaaggcccggcttggagatgcgcttgatgccctgaatggaacgctcaccgttcggaccgtacttgagggtgacctcaagagtctggccgaccttggcttccttagcggtgaagtccttgatgtagccttcgcgcttcaggatctcggcgatgttcgccttgaacttggagtacggcatatccacggtctcgtgctttgccgcgctcgcattacgcagacgcgtaagcatgtctgcgatcggatctgtcattgtcatttgggcttgttgccctttctcgctatggtttccgccgccctcacgcttcttctagaagcgattgggccgcggaccttcagcgtcgatgtttaccaactggacttcgtaacgccgggcagttcaccgcggtgagccttctcgcgaaggcagatgcggcacaggccgaacttgcggtagacggagtggggacgaccgcagacctggcagcgcgtgtaagcgcgcaccttgaacttcggcttgccggccgccttgttcttaagagcggtttttgccatatcagttctccttgaaggggaagccgaggtgcttcaagagcgcgtaagcttccgtgtcgtccttggtggaggtcaccacagtgatgtccataccgcgcacgtgatcgatcgaatcaggatcgatctcatggaacatggactgctcggtgagaccaaagttgtagttgccctggccatcgaactggtgaccgttgataccgcggaagtcgcggatacggggcagcgcaagggtcagcagacgatccaggaactcccacatacggtcgccgcgcagggtgacgtatgcaccgatggcctggccttcacgcaggtggaactgcgcaacggacttcttggccttggtgatcttcggcttctggccggtgatcagggtgagatccttgacggcgccttcgatgagcttggagtcgcgagctgcggcaccgacgcccatggagacgacgaccttctgcacacgagcaacctgcatcgggttggagtacttgaactccttctcgagctcagggatgatctgctcgttgtacttgaccttcaagcgcggggtggccggcgcttcgacagtggtatcggtcatgccagctcctttccggacttcttggcgacgcgtacacgcacggccttgaccttgccgtcacgcgcctcttccttaacagtgatgcccacgcgggtcggctgcttggtctccgggtcgatgaccatcacgttggagcgatggatcggagcctcagtggagacgatgccagcctgctggccctgctgcgtggcgcgcacgtgcttcttgacgatctgcacgccttcgacgatcagtcggtcgttgtccagcacctgcttgacagtgccttccttaccgcgatccttgccgcgaatgaccttgaccaggtcgccgctcttaatcttggctgccatgtcagatcacctccggggcgagggacacgatcttcatgaacttgtgctcacgcagttcacgaccaaccggtccgaagatacgagtgcccttcggttcacggccggagccgagaataacggcggcgttctcgtcgaacttgatgtaggaaccatccgcacggcgggattccttgacggtacggacgacaacggccttcaccacgtcgcccttcttgaccgacccgccaggaatggcgtccttgacggaggcgacgatcacgtcgccgatgccggcatagcgtcgcttcgatccgccgagcacgcggatggcgaggagttccttcgcacccgtgttgtcggcgacatgaagccgcgtttcctgctgaatcattgattctccttagccgagctggttctccccatttaccggggcaccttggtcttccgaggtgccccggtaaatggcgagccttgccgaactttacttacttggcgcgctcgataatggattcgagacgccagcgcttggtcttgctcagaggccgagtttccataatactcacgaggtcgccaatgtgggcgtcgttgtgttcatcatgggccttgaccttgctggtggaacgaacgaccttgccatacagcgggtgggtcgaacgctgctcgagctcgacggtaatcgtcttgtccatcttgtcggacacgacgtagccgcggcgaaccttacggaagttacgctcttcagccataatcacttctccttggattcggtagcggccggctcctggctgatgccaagctcacgctcacgcagcacagtgtacatgcgggcgatgtcgctcttgacagccttgagacgggcggtgttctcgagctgaccagtggcgtgctggaagcgcaggttgaacagctcttccttggacttcttgaggaagccttcgatttccgcgttggtcttctcgttgagattcttgatggagtaatcagcggtaccgactgccatcagatatcaccaccttcacgtgcgataatgcggcacttcatcgggagcttgtcgatagcacgacggagggcttcgcgagcgacgtcctcagacacaccaccgatctcgaacatcacgcgaccagggcggacgttcgcgatccagaactccggggcgcccttaccggaacccattcgggcgccgagcgggtgcttggtcaacggacgatccgggaagatcgtgatccacacgcggccaccacgcttgatgtagcgggtcatggcgatacgtgcggcctcgatctgacggttggtcacgtaggccggggcaagagcctggatgccgaaatcaccgaagttgatctcgttgccgcccttggacatgccagaacgcacggggcggtgctgcttgcggtacttagtcctcttggggataagcattcttgctcactccttcgtttctgcagcggcagtggcctcggcaggagcctcggccttgggggcctgagcattctgctgagcggcggaacggttgccacggcgcgggcggcgatcgccacgacggcccggacggttgttctgctgagcctgctgctcttcgaactcggattcggtcatatcgcccttgtagatccacaccttgacgccgatgcggccgtaggtggtcttggcctcgaagaagccgtaatcgatgagggcacggagggtctgcagcggaacgcggccctcgcgatagaactcggaacggctcatttccgcaccgccgaggcggccggagagcttgatgcggatacccttggcaccagcgtgcatggcgtcctgctgagccttgcgcatggcacgacggaaggtgacgcggttggtcaactgctcggcgatgccctgagcgacgagctgggcgtccagcgcggcgttcttgacttcgaagatgttgagctgaacctgcttgccggtcaacttctccagcttggcgcgaacgcgctcagcctcggcgccacgacgaccgatcacaatgcccggacgggcggtgtgaatgtccacgcggacacggtcacgggtgcgctcgatgacgatgcgggacacgcctgcgcgctcgagatccttgctcatttccttacggatctgatcgtcctcgagaacgaagtcgcggtagcgttcgccggccttgttggagtcagagaaccacttggaacggtgattctcggtgatgcccaggcggtagccaaacggattgatcttctgacccatctttagcgggctccttccttggtagcaacaacgaccgtgatgtgggaggtgcgcttgttgatacgagcggcgcggccctgggcacgagcgcggaagcgcttaagggtcacaccttcgtcaacgaaggtctccttgatgaacaggtcgttctcgcggaacggctcgccggccttgtcggccttcacgcgggcgttggcaatggcgctctccagggtcttgcggaccggaagggccgcagcctgaggggcgaacttcaaaatggtgacggcgtcggtggccttcttgccgcggatgaggtcgaccatgcggcgagccttgcgcggcgtcacgcggacgtgacgagcgattgctttagcttccatgttctattccttatccttagcggcgggctttcttgtcgtccttcacgtgacccttgaaggtcttcgtgggggcgaactcacccagcttgtgaccaaccatggcctcggtgacgaacaccgggacatgcttgcgaccatcgtgaacggcgaaggtgtgtccgatgaaatcaggggtgatcatcgaacgacgggaccatgtcttgatgacattcttggtgcccttctcgttctgctcgtcgactttcttctgcaagtgggcgtcgacgaaggggcccttcttgatgctacgagtcatcttctcgatactcccttacttgcggttcttgccggacggacgacgacgaacaatcatcttgttcgaagccttcttcggacgacgagtacgaacttcgcccttgccccacggagaaaccggcggcttaccaccgcgggtacgaccgccgtgcgggtggtcgaccgggttcatggactcaccacgggtgaccggacgcttgccgatccaacgggcgcgaccggccttgccgagctgcacgttggcgtggtcttcgttgccgacctcaccaacggtggcgcggcagcgggcgtcgacgttacggatttcgccggacggcatacgcagctgggcgtaagcgccatccttggcgacgagctgaacggcagcaccagcggagcgagcaatcttggcgccacccagtgggcggagctcaatcgcgtgaaccacggtaccggtcgggatgttcttcagcggcaggttgttgcccggcttgatatcagcctgagcaccagtctcgatgacgtcgccctgcttaacacccttcggcgcgatgatgtagcgcttctcgccatctgcgaagtgcaggagggcgatacgggcggaacggttcggatcgtattcgatctcggcaaccttggcgggcacgccgtccttgtcccaacgcttgaagtcgatgagacggtactggcgcttgtgaccaccaccgcggtgacgggaggtgatacggccgtaagagttacgaccgccggtcttggagttcttgcgaaccagcgacttctcaggcgtggagcgcgtcagatcggagaaatccgagacggacgcgttgcggcgacctgcggacgtcggcttgtaaacgcggatagccataatatagttcttcctttaacttttctcggctagccttcagttgccaaagatgtcgatcgtctggccctcggcgacggtcacgatcgcgcgcttctgggaagcacgctggccgaaaccggtgcgggtgcgctgcttcttgccagcgcggttgagggtgttgacgttcgtcaccttgaccttgaagatctcttcaattgcctgcttgatctgcaccttgttcgcgtccttggccaccacgaaggtgtactggccacggtcggaaagggcgtagctcttctcagagacgacgggcttcaaaatcacgtcgtgcgcgggcttgtgaatagcgaccatctaaatcaggcctccttcggctcggtcttggcagccacgaaagcttcgaaagcttccttggtgaagaccacgtactgagcggtgatcacgtcgtacgtgttgagctgatcgacaaaaatcgggtgaacggtcgggatgttgcgcacggagagccactcgttgatgttgtcacgagtgaagacgaccgtggtgaacttgtcctcggtgatcgggctcagggcggcgacagcagccttggtggacggctcggtgataccgaagtccacgacggcgatgcggccggcgttggcgcgatcagacagggcatagcgcagagctgcggccttcatcttcttgggggtgcgctgggagtagtcgcgcggctgcgggccgaacacgacaccaccgtggtaccactgcggagcgcggatggagccctgacgagcacgaccggtgcccttctgcttccacggcttcttgccgccgccggaaaccatgccacgagtcttggtggcgtgggtgccctgacgggcagcagcgagctgagcggtaacaacctggtgaatcagcgggatgtgagccttgacgtcttcagcggaaacaccgaagagttcaaccggagcctcgacggtaccggcggcctggcccttggcgtcagtgacgttcagagtaacgtttgccatggtttatcaggctcccttcacagccgaacggacgagaacgatgccgcccttggggccaggaatggcgcccttgatggcgatgatgccgttctcgacatcagcggagacgacggtcaggttctgggtagtggcggtcacatgacccatgcggccggccatacgcttgcccttgagaatacggctcggagtggcgcatgcgcccacagagccaggacggcgctcgttcttatgagagccgtgagtacggcggtaggacttgaagccccaacgcttgatagtgccggcgaagcccttacccttggtagtgccggtcacgtcgacctcagtgccctcttcgaacaggtcggcggccagttcctggccagcctcgaactgatcgacgtcgtcggtgcgcacctcaacgaggtggcgacgcggagtgacaccagccttggcaaagtggccagccagcggcttggtcaccttggtcgggtcgatggcgccgtagccgagctggacagccttgtagccgtcggattcctcggtcttcacggcagtcaccacattggtggacacgtcaacaagagtaacgggcacgaagaagccgttctcgtcccacacctgggacatgccgagcttcttgcccagcagagccttgcgattagacataatgcttcctcctcccttacagcttgatttcgatgttgacatccgcaggcaaatcgatgtgcatcagggagtccacggccttgggggtcgggtccacgatgtcgatgaggcgcttgtgagtgcgcatctcgaagtgctcgcgagaatccttgtacttgtgaggagaacggataacacagaagacgttcttctcggtcggcagcggaacggggccaactacagttgcgcccgcgttcgtcaccgtttcgacgattttcttcgccgattggtcgatgacctcatggtcataggacttaagcctgatgcggattttctgtcccgccattgccgtccgccctttctagcgatgttcgttgtactgtttaccaacctgcttcttcagggcaccggcgcgcatggcctcccttggacatacgtcctttggcggtcatccgacatcagtgcgcagtctccgtttgccacctacaagaagtggttcccggcccgcgctcgctttttcaattccaatttgcgagcccaaatcaggcaacttgtttattcaaccatcgaggcgggacactggaatccgcgcgtgtcgcgtgctcgcgccgaccatactctcatattctccgctgacgatccgcctcgcggctaagcttccactccgtctctcgcagcacccgtaccctcatattccccgcaagacgaaaccttgagcaatgccaatgggcctttatacctgtttgcgtcccgcgttacaggtaattcggtaccagttattagtgttgcaggtaaataggtactatgaggaaccgatctccggctgtaactagaccccttatacctgcgatccgataaatcgacaactaatacctgcagatatcaccctcaaaagactcctttatacctgcaggcacgcaaaaatacgtgaaagtgtgtccgcattcgatattttgcattcgtaagttgacaccttatacctgcaattgttgcaatactcataaaacgaaatacctgttgcaggtaataaggcaccatgaggtactgatcgttagcaaccagcacctatcatcagcaatcaacagccaatgattaatcgtcaccaataagcaaccagtagccacaccaactggcattccctctatcaaccaccgactagtagtcaataaccgcatgtcggcaaccaccagtgtctgttaccagtcaatcgtcaatagccgtaccaaccgtccacatccttcggccgccagccatatggtgactagccgaccactctcatcaccgccaactagggtgtgtttacactatttaagttttgcgtgataattgtcgtatatgtacgccaaggtatgacatcacgctggatcagttcatgagggtcgcgcacctgctgccgcgccagaggggcaacgtggcggtcgacaactacacgttcgtcaacgccttgctgtggatgtgcaggacggggacccgtggagggatttgccggagtgctatggcaagtggatcaccgtctaccagcggttcaaccgctggtctaggaacggcgcaatcgagcgcctgttcgccgccctgcaggaggaacggatcatcgccgtcgaggtcagggtgctcgccatggactccacgagcgtgaaggtccaccagcacgccacgggcgccctgaaaaaaagggggccgcagtccgtcggcgtatcccggggaggcaggaacaccaaagttcacgtggtatccgacagcgagtcgacgctcgtcgaaatccatttgagcccgggcaacgagcacgacgcggcccacgggcgccgctccatggccgcgctcggcgcattcatgggcgcgaagctgctcatggaccgcgcctacgagggggattccacccgcttgctggccgagtcgttcggcccgacgccggtcgcgccgcccaagaggaaccgcgcggacccatgggactatgacaggcaggcgtacaaggggcggaacgtcgtggaacgcgtcttcagccgcatgaagcactaccgcaaggccgccacccgctacgacaggctcgacgccaccttcctcgccaacctccaactcgccctcatcgccatccaactcaaaaacaccagcaaaaacaactagtgtaaacacaccctagtaaccggcgaacaccaggctaataaccacccaatcgcaattacagttgcgacctcggcactcccgctttcactagtttgcgcaccaaagggactctctccatcgcttctctgaaagagaagcgaaccacaccatcagcaacaagacgaatccgttcctcacgctccttctccgcgataatagtttctgacagatcgccattacgaaacatggattcgtcccgatacttcacacgcccatccaattccgcaacaatcagacgaccatctggggtgtgccaagcgaagtccacccggtcgcggtgagcaagatcaaaggaatatatcatctcttcttgcaatgaaggttccatgaaccgttcttcaagaatgacgccgagcgcataggcttcaccaccgttttcggtttgccctgtggcgcattccagcacacgcagagcctcagccttaccgttgcccagcattgcaccaaaatgttggcgtaatatctttttgccgacaacgcgcctacgcaatgttgcttccgctattgccaatgcatcaggaaaatcctgcttgcgcatgcaatcgaaagcagtgcggggcaatggggtcactctcaccccatcgacaatctcatacggtaccgtccccatgtagtggtggcggactagcccataatcatgtacagcggtatttctgtcgacggcaatattcactagcttcatatgccgtgtggattcgttaatgccgtacatggcggcggcagtcatctcgcagaacacccattgcggatgcgtggcggccagtgagcgaatgatatgccgatatcgttcggctccatctagaccttgccaatatgccgggcgcgcatacatacctttatatacacactgcaattcgccagcttcggtacgtctggtcagcgtgcgctgccgtgatttatttgccgaccataggcacagtcggtgcgactgagcttcatccagctcccgctccaaaccaatatttcgtctcatgcacccacgctagaggagtacaaattccattgtccagccgaaacaacctttgtggttatagcttatggagttatccacattcagataggtttgaggcgtcggtgagtcatactgcggagttttcacagccgagttatacacatttgggctcactcggaacccgttgagtccccttatccagcccatgagaacaatttgttgagttcgatgtaaataagccggcaatcatggatgagctgccaactaccagagtcgttcaatcagctgcacgtgtcataaaccacgcaccaaatatgatcgttcggattgtgacgtacagcactgggcgttacgctaagcgacgtgacacaatcactggcaaaaaacatcaaacccattcacgaacatggcgcaaacgtgctgtaccaacatggcaccctggccctactggtaccaggcctgctggaaggcaccaccaccatcggcgagctgctcaagcacggcgatacgggtatcggcaccggcgaagggctcgacggcgagctcattatcttggatggggtcgcatataaggtcggccaatccggtgtggccgagcgcgtgccagatgatttcacgatgccatttgccaacagccatagggcggcattccagtatcagtgcgaacgcgaagatattggtcttgaggaactgaacaagaaaatcgttgaggccaacggtcgcgcgaacaccttcttctcggtggtggtgcgcggcacgttcagtttcatcaagacccgcgcggtcatcaagcaacaggcaccctaccccacgttggtggaagtggccgatcgacaggccgtgttcctgcgccacgatgtcaaaggcaccatgctcggatacttctcccctgtgatgtttcatggtgctgccgtggccggattccatgagcattttctgtccgacgaccacacgttcggcgggcatgtgcttgatgcggtactccaacgaggcaaaatctacagtcaggtattcgacaccctagtacagcatctgccggtggatgatcccggataccgcaatcatgatttcagtcaggatccgattgctgaggccatctccagtgccgaaggcgacattcgtccacacaacgaatgattgcccggccaatagtccaagcccactcccccatagctggcggcattggccctcggcactttctgggacgaaacgaatgttcctcactccccgtggccggcggcattgacttgcattgcgaatgattgccaagccaataggctcggctacccccacacagcctgcggcatttactcgtatcgcaaatgatttccgcaagaacagcgcgaatccaactcatattcttcggataaccgcgcataccgcgcgcacgcctgaaatcggactcccacactgccggtattcggttaacacgttattagtctcacattgctcttacctagaaccggccgctacgatactattgccagctatgacggcacaacgcacgacccgcaaacgtgattggtttgacaatcagcccggcgcatgggtgatggttatgctgcccgcagcggcaggcttcattatcggtggtcctaatcttgatacgctctggctattggcgatttgggctttgtgctattgcgtgcagttcagcgctgcgcactggttcaaggcacacttttcgcaccgctatctgccaccgatgattgcctataccgtggcacttaccgtaattggcctgccattcctgattacgcataccggcatactgcgctgggctcctttatatatagtgctggtcgcgctatcaatgctgtcctcgtggttgaggaaggagcgctcgctgtggggcaatgcggtatcggtgattgccgcgtcgacgatggccacggtaatcgcgtcattcggcagcgctgccaagacggcatgtgctattcctctcaacgcggcgcaagcctcgtgcggagccgatgcagacgccgcacgtgccatgattcggaatatgccgggattcagccagatatttgaaccccgtgcctggtggcccgctggttctttgcccatgaacgggctgattgccactgcgctgttcgcactcatgcaatacagctcggtattggtggtcaaaaccatgattcgagaacgtgggaagcgttcgtacgtggcagcatcgtgggtatggcatgtgatgttggtggcgctgaccatagtggcagggcataatccgttcctcataacaatgagcgtgctgctactggcccgtgccatcgccctgcctgtggccgctcggtaccgaaccatgaaacctgtggtaactggtattaccgaagcattcgccagtcttattgcttttggctgcattcttgcggcggtgttgatgtaataccgcctatgcatagagcctccaccgcgcggtgaaatgcccaccacgtagtgattcttccaccacgatgttagcgagagttccttatccgcggaattccgccattctgggacactgcgcggtgggaaatacacgtcgcggtggcgccccaaaggctttccatcacatagcaaaatacacaacatatgacgttgataatggttatgccggtttctgatcggtgataatggtggatgacggcttgggcggtgaccccacatttgactgacgccatcggttccggtggctgtccttattttgatttgtcccgcccatggccgccgacccgtgggccatggatgcatgacctcataggagcgtggccgctcccgtcggatcccgcaagaaccatggtagcgtgccccgtcaacgtcctgtctgcgccgcaagcccccgggaggcatccgaacacatggaaaggaacgacgacgatgacgccgccgaacgaagtggtgtgggccgggatcgacacccacacggacacgcacatcatcgcattgctcgacgagcggggcaggccgctgggcgccgagacgttcacggcggacccggacggatacgacaggctgatcggcatgctgcccgggccgggcagggtcgcggccgtgggcgtggagggcacgaactcgttcggagcggccctggcccgtcgtctcactgccgccggatacgaggtgcgcgaggtgctgcgccccaggcgaagcgtgcgccgcagggacggcaagtccgatcccctcgacgcggtcgccgctgcccgtagcgtcatggccggcgacggcacgagcctgccgaaaagctcggacggctgggtcgaggcactgcgccacctcaacgcgcagcgatcccaactggtgtcggcgatgaccgcgatctccaattcgacgaacgggctgctcgtcaccgccccggaacccatcagggaacgttaccgggggttgaggagcgagacccgcatgaacaggctcgccgaatgcagaccggccggcggcctggtcgagcggagcgtgctggccgcgctgaaatccgccgccaaggcatggaaggcgctcaaacggcaggccggtctcctggaggaacgcatgcgcctgatcctcgaggaacacgccaggccgctgctcgacatgtactgcgcgggcgccgtcatcgccgcgaccctggccatcgtcgccggggacaaccccgaacgcatccgaagcgaggccgcgttcgccaaactctgcggcgtctgccccatccccgcgtccagcggcaggaccaaccgacacaggctcaacaaaggcggcaaccggcagggcaatatggcattgcaccgcatcgccatcgtccgcctgcgataccacaagccgacccgcgactacatggccaaaaagacccgcgagggcaaaggcaagctcgagatcatccgctgcgtcaaacggttcatcgcccgcgaggcataccgggcgctcatcagcatacgcaacggcgaggtcggacgcgggaccccggccgaacgcggcgccaagctgcgcgaactacgcgtcagccggaacatcacccagcaacagatcggcgaggcgctctgcgtgccctcgagccgcatcagcgagatcgaacgcggcgcacgcgaccttcccgaactcgagcaacgggccatccagtggatacactcgacaaccaacccaaaacaacacacccaaacgcttgacaatgtataggagcatcaaagagcccggccccggaatggggtcggactcctgttacgcggtcatgaaaccgtttggtctcatatcgctaatggcacatggccattagactcttgcaatcagcgctcggaggcttcctcagtggcggcctcgccttcgcgctcgatgcgcagcttgtggccttcctcctgggagacgccgtagtaggcaccgacggcgatgtccttcatgtcgttaatcagcgggatgcgcgggttagccggggtgcactgatcctcataggcacgcatgccgatctgatcaagcacggaccagaagtaatcctcatccacgccgcaatcctggaagctcttgttcatgccgagcttgttgtcgcggtaatcctcgacggccttagccaggttctccacggcttcggccggggtcttgccggtgtcgatgccgagattgcgggcgatgtcctggtagcgctccggagcgacgtacttgttgtacttcggccaagaggtgggctcctcaggaatctggccgttgtaacgaatcacatacggcagcaggatggagttggtacggccgtgggcgatgtggcacagagcaccgatggtgtgggccatgccgtggcacatgccaaggaacgcggagccgaacgccatgccggccatggtggcggcgttgtgcatcttctcctgggcgtcggtcttggccaggccgggctcgccgttgacggactcagccaggttgtcccagatgagcttggcagcgtgcagcgccatgccgtcggtgaagtcgttcgcgtacacggacacgtaggcttccatcgagtgggtcagggcgtcgaagccggcgtcggaggccagcttgcgcggctgggtgcgggccagcaccggatccacgatggccacggacggggtcagggcgtagtcggtgatcgggtacttgtagccggtcttgtggtcggtgatcacagcgaacggcgtgacttcggaaccggtgccggaggaagtcgggatgcacaccagcttggccttcttgcccagcggcggaatcttgaaggcgcgcttacggatatcgaagaacttctcgcgcacatcggagaaggcgatttccgggtgctcgtagagcagccacatgatcttggaggcgtccatcggggagccgccgccgaccgcgatgatcgtgtccggctcgaactcgtcgcgcatcatggccgcacccttttcgacggtctcgacggagggctccggctcgacgtagtcgatgatgcggaaggtcacgcggttggaacgggcacgcagctggtcgatgatcttgtcgacgatgccgagctgctccatgaccttatcgcagacgatgacggccttctcgatgccgtacatgtcgcgcaggtacttgatggcgttcggctcgaagtaggtcttggccgggatcttgaaccactgcatgttgttgttcctccgagcaatgcgcttgatgttgacgaggttcacggcctgcacgttgccggaaaccgagttgccgccgtaggagccgcagccgagggtcagggacggggcgatggcgttgtagatatcaccgatgccgccgagagaggaaggctggttccagatgatgcggcaggcgtgcatacgaacaccgtactcgcgcacgagctcctggttgttggtgtggatggcggcggtgtggccggcacccagcttgagcatcttctcgcacatctcgaaggcctgctccttgttattggccttgaggacggcctgcaccggagcgagcttctcgtgggtcagcggctcatcgtcagagacttccttgcactccgcggcgaggatggtggcatcctcaggaatgtcgaagccggcggccttggcgatgaactgcggggacttgcccggcaccacggagttcagcaccggcttttcaccggaaccggccacgcagccgaacatgtacttctcgagcttggccttctcttcggcattgacgaagtaggccttgcgcagcttgagttccttgatgagcggggcgtagacgtccttgtgggcgatgatggcctgctcggtggcacagatcatgccataatcgaagtgcttggagagcaccagatcgttggcggcgcgcacgatgtccacgtccttgtcgacgtaggccggcgcgttgccggcgcccacgcccaaggcgggcttgccggaggagtatgcggccttgaccatgcccggaccgccggtcgcgaggatggtggcgatgccgtcgtgcttcatcagtgcgccggtcgcctcgatggaggggtgctcgatccactggatgcagttctcgggggcgcccgcctcgatggcggcgtcgcgcacgatcttggctgctgcgacggaacagttctgggcgccggggtggaagccgaagatgatcgggcagcgggtcttcaatgcgatcagggacttgaagatggcggtggaggtcgggttggtgaccggggtgacgccggcgaccacgccgaccggttcggcaacttcatcgatgccgagcacgtcatcttcgcggatgatgccgacggtcttctgaccagccaggtagttggtgatgtgctcgcaggcgaagatgttcttggtcgccttgtcttccaccaggccacggtgcgtttcgtcgacggccattttggcgagcacgagatgcttgttcagcgccgccacggaggccttggcgacgatgtggtcgacctgcttctggtcgagcttttcgaattcgacgagagcctgctggcccttggctacgagtgcgtccacttcagcttcggctgcggcaagcttttcttccggagtcggcttcgttgcgctgttcttagtttctgccactgtaggatcctcctctaatagagatctggaacgtggtgcgttattccttattgctgattgccgttgtgcaacagtcacgtcacgacgcttcatgacactgaatcgcctgtgacctgcatcacaatatacatgacccattgcatcttttcatcccttaagcgagttgtgcgtttcgtgttatattccgtgtgcttaatgttcaaacaaggattatttttgcacaaaactctgttcactctctcctaattgtaaccttttgttcattttatatatcaaatgaacattgcatcacccctatttctaaaagccgttttttaaaactcacgtattcaagtctgccttgttagacaacttctacaaaatcattttattttagtgggcttgtcgtgtgaccgcccatcggcgaaatcaccaatcggcgttatcactgggtttccgccccgccttccgatgagcctttcgatacgtcgacggcgtcgttcccgtctcgtccagaaagcgccggttgaaattcgacgcattgtcgtacccgcattcctcccggatcctggccaccgcgcgatccgttgtggccagcagacgtttggccctgccgatacgcagccgtcgcacgaaatccgagaatccgatgccggccgcccgcttgaagaaacgggaaaacgccgaagggctcatcgacaccagacgggccgcctcctccagcgatatctccccggccaggttctccgtgacataggcgatggcctcgttcaccgtgcgttcggtgtcggagctgagctcgagatcataccccggcgtcaccaccgtggatgcctcggtctccggagcgtcggcgaatacgccgaacagctcgatcaggtcggccacacgacgcgcgggatcatggtcgcccatcccctccagcaacgctccggcagcctgggccgactccccggacagcaccatcgcacgcgcggcacggcgcagtaccagattgaaccgggcggtttccggaaaacacgccatcaacgccttcacggtctggggacgcacatggcacagcacgtcacgtcgggccaaccgctcccccggcttcacatcggaaacccagttatgcggaagattcgaaccaatcaaggcgacatgcccggcgcggcaggggaccacgcaatcacccaccatcatcagcccagaaccctcacggatgagatggaactcgatctgcggatgatgatgccacttggccagtgaattcggatacccgtggcttgcccatcgcaccgctgcatcggcatcgggaacgatgacctccaacgccccagagcccgattccacgacggtccgacgacggtcggcgaacatgatatcggcattcatcgaagcccccttcgcttgccctggcatcaccggcggaacggcccggcccatcccaccggatgggccgaaccatacccggctcagtcgcgatccacggtaatctgcaacttgatatcgccgggacgtccctcatccatacggtcgaaggcggccttggcatcggccatcgcataggtgtcggtgatgaacggcttgaggttcagtttaccgctggcgaccaggtcaatggccttctggtagacgttcgcgtaacggaacacattctcgatgcgcacctcggtcgcctgcagctcggtgatgtcgatgctcacgggatcgaccgggatgccgacgaggacggcggtgccgcccggcgcgacgagcttgaagaaggtctcgtaggctttgggggcacccgagcattcgaagatcacgtcggctccccagcctccggtttcctcacgcacgcgttcaacgagatcctccttggtgagatccaccggcacgattcccggaatcttgccgatgatgtcgagtttgatgctggaaacgtcggagacgatcaccttggatgcgccaccggcaagcgcgcaggaggcggtgagcatgcccaccgtgccggagccggtcaccacgcacacgtcgccgggtttgatgccggccttggtggcggcccacatgccgacggcggtgggttcgagcagcgctccctcgccatagctcacattgtccggaagcttgtaggtgaacgccgcgggatggttgaccgtctcgcacaggcagccatccaccggcggggtggcgaagaaacgcacggccggatcgacgttgtacatgccgagtttgctggcacgggaattcatgtccggaatgccgggttccatggccacgcgatcgccgacttcgaagccttcgacgcctgagccgaccgcgacgacggtaccggaagcctcatgccccaggatcatcggctgttcgaccacgtatttgcccacacgcccatgcgtgtaatagtgcagatcggatccgcacacccccacggtatgcggggcgatggtgagctcccccgccgccggagccggggtgtccggcacctcacgcacgttgatgacgcccttcttctcaagaacgactgccttcatgatgtactccttctgtttgtttggttgtttggttacatattcgattgccggcgggccacggcaccatggccgatgacaccgacgagtgggctctcaccgtcgagcgacgacctacccccgacattccggttcgggctgcgccaattcgccgctcgactccagaggcttccgggattccaggaccgtggcgcctttgcccttcagtcgccgcccgcgttcatcgaacccgggctgcttcggccggatgaacaccgtgatcagcgaaccgaccgcatagagcccggcataggcccagcacacgccgctataaccgacggtggagatgagaaccgtggcgatcagcgggccgaagaacgtggtcaagccggaggcgagattgtgtgcggaaatcgccgcgcccttatgctccggggcgagggccgggaatatggcccccatcggtacgaaggcggagatacccagaccgagcacaatcgcgtcggcgcacatcagcgccatattgccgccgaagaagcggggaatgtaatacatgcccagcgtgccgagcacgcacccccagcatccgaaccagcgcatctgccgcatccatccgtaacggtcgcccatacgaccccagaacacgttgccgaacacggtgacgacgaactggaatccccagatctggctccactgcgagacttcgaaccatgcgccgccgccattggtatgggtggcgagatacagcggcatgatgaccgggaatccgtacagcgtgagattgcagatcacacggaccaccgccgcgagggcgatctgccggttctccacgaggatggtggcgccgcggctcagctcatggaatttctccttggcgctcatcccttccgtcttctcgttgcgggtcgacggcaccagggcaaggcagatcagcagaccggcaaccgcgaacggcagggacagccacaagctgccgtattccccgacccatccgatggtgaaactcggcaggtatgcgccgaacacgccgatgccgaaggaataggacgtccagaaccagcccatcgccgtggcgagcttgcccggatcgacggtctgcgagatcaggaccacgaagctgtagatgaacaacggatatcccacgcctcgcatcgcgtacaccgcgagcatcaacgcataggaaccggacggcaatgccatggtcaggaacaccagatgcaggcagatccacgagatcgcgccgatgagcatgatgcgcttggcgccgaacatctcggcgagcacgccagacgcccagcctgcgaccgcggccatgagcccgtacatggtgaacatcagcgaggcctgagatgagctgaatccctgatcgacaatgtatttggacaggaaggtgagttcgaagccatcaccggtcatgaacacggcgatggcaatgaatcccgccaacagtttccttggcaatcctatggacatgtttcctcgtttcccagcacttcgttgtctgttgtgtctgtccgctcctccttgggcgtaataccattctcatgctggaaaaccgggtgttttggtgcccaaccacctcgttgtgatacttttttaacacgcgagacagggcaacatttcaaaaagtcttttgctaaagtaatgaggggccttacataggcaacgacgcgcgaaacggaaaggatacgtcatgaagcccatgccatccacagcggtcaaacaggccaaccgtcaggcgataatcgaccatctgtaccggcatggcccgtccaccaagcagcatctgcagatgaccctcgggctgagcctgcccaccatcaccgccaatctgcgtgaccttgaggatgagggactggtcggacgaggcgagccgacggaatcgaccggcggacgcaaggcgcagacccacgtgttcgccgcgaaatcgcatgcggcgatcggcgtgaggatgcgcgcggacggcgtcacgctggtggcggtggacctgtacggcgaggtgatcgcccgcaaacgcaagcgcgtctcctaccgcaacaccagcgactactacgatatggtcggcgatttcgtcaccgaattcgcggggcgtgtggtgcgttcgggaagccaggtgctcggcatcgccttctccatccaaggcatagtctccccggacggcagcgcgatcaccttcgggcagatcgtcggcaataccggtctgacgctggagaaactcacccggcacatcgaattcccggcgctcatgatccacgactcggacgcttcggccatggccgagctctggttcgaccccagcatcagcgacgccgtctgcatctatctggaacggcgcccgggcggtgcggtgatcgcccatggaacgctctaccaagggccgaacctgtccaacggcaccgtggagcacatgtgcctggcgcccggcggaaaaccctgctattgcgggcagcgtggatgcatggacccgtactgctcgccggaagccctgctggaggacggcgaaggcatgcccggtttcttctcggtgctgagccaaggcgaacgcgggcatcgtaagcgtttcgacgaatggatggggtacgtggcgcaggcgatcgtcaacatccgttcggtgatcgcgggcgacgtgatcatcggtggcgaagccgcgcaatatctggacgacgacatgctgaccgaactcaagcatcgcgcggagtcgctcagcccgttcacgaccgacttcacactgaagaaaagcatctgcatcgaggatcagaacaccatcggcgccgcgctgcgtttcgtgcgcgactacgtggacggcatctgcggacgcatgaggccactgccccgaaggtgaacacgatacgggaagggccgctgccctaccttggaatcaggtggggcagcggcccttcccgccattgcggatccggttatcacacgatctggcagaattcgatggtctcgtcattgggaccgtacacgttgaagtagcggatgccatgctcccagaagctgtcgatgtgctgaatctcggtgtccttgaactccagaccgagcttcttggcgttggcgaacgcggcctcgatatccggggtgtcgaacgcccagtggttgatggcgccggtgacgccgggtgccggctcaccctcccaggtttcgatggtcagatgcccgtagcgcaggaacgcgcaacggttgtcgccgttatggaacagtccggcgagttcaaatccgagcttttccgtgtagaacgcgatggtttcgtccagatccctggcgatcatgccggaatgctgcagatcggtggtgaaggcggacatgggtttggtcatgatgatctcctttgcattggttgatggatgatggttcatatcaacgtcgttgacgattggattgcgattaagtctagacggcttcggctgcggcaacaccgacgccgatgctctcctctgataccgtgttgaccgccggcaccgcatcgtcttgcggcgccgttccgttctttgccttagcgatccgatggccatgctcgtcgaatccgggctgccgcggccggatgaacaacgtcagcacgaatgccagcacatacaacgccgcatacgtccagcacacgccgccgtacccgatgaccggcagaagaatcgtggcgacgccgggaccggcgaacgtggtgaggcccgccgcgagattgtaggcggacaatgcggcgccctgtttgccttcaccggcgtacaacgtcatgatggtcggcagcgacgagaaggcgcaggtgccgatgcccacgatgatcgaggcgacaatcatcatcagcgcgttcgcgccgaaccattgcggaatgtagtagaaggcgacggatccgacggcgagcaccgcgcaaccgaaccagcgcatcggccacacccatccgaaacgatccatgaaccaaccccagaaggtgttgaagatcagggtgaccacgaatacgaagccccagatgcgcatccattcctcggttttgaagatgttgatgccgccgttgtgcgtggtgcacaggtataggggcatgatgacggggaagccgtacagcagcaggttgttgatgatgcggataatcgcgcagatgaggatcttgcggttggtgacgaggatggtggcgccttcggccagttccttcagctgttccttacggctcagcccttcgcctttgacgaccttgttcttcggcacgaacaggaagcacatgatcgtgccgacgatggagaacggcagcgcgaaccagaaggtgcggtattcgccgaacaccggcatgatgaagctcggcaggtatgcgccgaacacgccgatgcccagcgagaagcaggtccagaagaatccggtggccgaggcgagtctggacggggagatgtgctgcgccatcagcaccacgaaactgtagatgaacagcgggtagccgatgccgcgcagggcgtacaggccgaggatcagcggatagatgcggctggggatggccacgccgaggaacagcaggtggatgccgatccaccagcatgcgccgaacatcatgacgcgtctggcaccgaacatctcggcaagcatgccggcggaccatccgcccgccgcggcgaacagaccgtacacggtgaccaacagcgaagcctgggatgaggtgaatccctgatccaccatgaatttggagaggaaggtgagttcgaagccgtcaccggtcatgaagatcgcgacggccaggaagccgagcatcagcacccggggaacgccgaggcgctcaagcagcctaatcatgagcaataaaccccttacccgaccttcaccgacgttgggaagatcgtttcacagtcatatgaatgttcgcacacagcggttccggcccctttgccggcgccccgcaccgcgggaggcatggccgccgtccgtgtgcgcgtggcgacggccatgatttcatacgtgtgggcggatggcccgtggcgtcactcgccgatcttgacgacggccttggaaacgcccttgatcttgccgtcgaggaagtcctgcacctcgtcgagccccagttcgtggctgatcaggccgccgatgttcatcttgccggcggaaaccagcgagatggcatcgcggaaggtgagcgggttgatgaaggagccttggatggtcagctgcttcttgtaaatgtcgtacgtattcatttcgaaatgcgcctcctgcgggccgacgccgaacatcagcacctgggcgcccttcttggccgcggcgaccgcctgggcctgggtggcgggcaggccgaccgcttcgacgatcacgtcgtaggagtccgccggaatctgctcgcgggtggtgttgtacgtttcagtgacgccgaaaagctccttgttgcgctgcagcttctcgtcgaagattccggcaagatccacctgatgcacgccgtacgcctgcagcagctggacgaagatctgccccatgaagccgtcgccgatgaccaacgccttctggtacgggtgcaacttgagcagatcgagtccgtgcaccgcgcaggagaccggttcgatggcggccgcgtcacgcagggagacattgtcgggcagcttgtagaccacagtggcgggagcggtgaactgttcggccagaccgccgtcgcgggtgacgccgaccgcgctcaagtggtcgcatagttccggacgctgagtcaggcagaattcgcactggccgcagtagatgttcggatcgacggccacgcggtcgccgaccttgacgttggtgacttctgaaccgaccgcggcgacgacgccggagttctcatggccgagcacgatcggcggaactgcggcagcggagccggggcgacctgcgtacaggtcgtggtccgtgccgcacacacctgcatatacggtgttgatcagcacttcatcgggttcgatctgcggtgttggcatgttctggatttcgaatttcttgacaccggtcagtacaagagctttcatgatatgtcctttccactatgaaagaggttccggcagatcgttctgcctgatgattgaaaactatacactttcttaaattcttttgcaaatctcttttcataaagttatttgcaaagcgtgttgccgcagaaactcaacgtttttcaaaaaaccaccatcacaatatgcacatcatcatcaaaaatagccagaacggcatctcaccggcagcgcagcaaccatcgatctgacatgggcggaaatggtcccgacatagcaagtcaacagataattccaaagtgtttagaatgaggttatgaagaacccgtctttgcaccgttacgcaacccgcccaggtctctacttcaccgatgacggtggcgccgacgccatcgtccgctcggaaacagcagaccagctgtggttttgcgtacttgaaccacttgaccagccgagcgccttctatgccgacgcagtacgattgttcaacgagccggggctgaccttcatcgatcaggcgatgaaacagcgcatctgcactcggcgaatcccctcgctcaatcttcgcgaaacactattccgcatggacgggcccaattacggactgtggtacgttcacgttccccaggcttgggatggcatgcaatacggataccgcgtcaacggcccatgggaccccgaccacggcgtgagcttcaacccgtacaaactgttgctcgacccctatgccaaaggcatcgaaggatcaatggagcttgatcccggagcgttctcctatgaatgcgagatcgtgaacggcaaagtcaaaggttcgccattcggcccgatgagcaccatcgactccgtggggcatgttcccgtttccgtggcgatagacgaccgtgccaccaacaagcatgacggtgagccatcacacccgcatgtggcatggagcaaaaccgtgatctacgagctgcacgtcaaaggcttcacagccaacgcgccttggcttcccaaagagcttcgcggcacctatgcaggtttggcacatccggcgacgctctcctacctgcaggatttgggcgtcacttccattgagctgctgccgattcaagccaagcaatccgaactgtttctgcaggaacgcggacgcgtcaactattggggatattcgacgctcggctatttcgcgccggaagcctcatacgccaccaagcgctcccaggaggccggcgccgccgccgtacgccaggaagtcattgacatggtgcgcgcattgcacgaggccggtttcgaagtgattatggacgtggtctacaaccacacctgcgaatccggtccggaagggccgaccgtatgctggcgcggacttgacaatctgtcgtactatcgacgcaccaaagacaagatgagtcgcctgtacgacaccaccggctgcggcaacacacttgatttcaccaacacgcacgtcaccacgttcgccgtggattcgttgcgctattgggccaaacgcattggcatcgacggattccgattcgatctcgcggcgacgctggcacgtctcgacgatgaattcacccgctaccatccgttcctgtatgcattgcgttctgacatgctgctcggcaatctcaaaatgatcatggaaccttgggattgcggtccaaatggctggcgcaccggcgaattcggcatccccttcgccgaatggaacgacaggttccgcgattgcacacgcaaattctggctgaccgacgtggatcgcatgcgcggtggagaatacggcgaaatgaccatgcaggagatggccacacgtttgtgcggatcatccgacctgttcgccaccgatccaggccgcggttcgaccgcgtccgtgaattacgtggcatgccatgacggcttcaccacagccgatctgaccatgtacaaaaccaagcataacgaggccaacggcgaaaacaaccgcgacggaacaaacgacaatcattccgtcaacttcggtcacgagggccccagcggcgatcaaatcatcgtgcagcaacggcaacgcgccaccatgaacctgctgggtacgctgctgctttcgctaggcacgccaatgctgcttgccggcgacgaattcggcaattcgcagaacggcaacaacaacgcctacacgcaggataacgacaccacctggcttgattgggattggctgtacagtaccgaacaaacgccggaattgaagcagttcaatctcacttcccgtttaatcacattgcgtaaatcccgtgatttgtacaatcatgaggatttcttcactcgcctgagcgaaatcggtttgctgaagaaatccgatcgcgtgcattggtatttgccgaatggacagatgccaaatgatgcggattggacgaatccttccgtccgtccgttcgccatgcagctgctatctcccgacgagccaagtctgctgattctgatcaacggttccgatgaggtcacgcgttttcatctgccgaaagacatcgaatgggagatggtctggtcctcgtcggagattgtcggcgaatatccgggattgggaacgtccatcgaacgtgtgtcggaattcgacgaagaatcggaaagcaagcccgcgggcagactccgcaaccatctgcaccgcatcaacatgatgtactggcagatgaaagacgatgcggacgatctgcaatccgccgatgatgggctgtcggaagatgatccgacattgtggacgcttccggcattgagcatcagcgcgatgaagcagatgccaaccatctaaacgccagtcaaaataccgtccgaaataccaagaaacccctcggaaatcgaatttccgaggggtttcgtataagccgtaaagctttagcgcttggagaactgcggggcgcgacgtgccttgtgcagaccggccttcttgcgctccacgacgcgggcgtcgcgggtcaggaagccagccttcttcagggcggcgcggttggcgtcacgatcgatggcgttcagagcgcgggccacgccgagacggatggcgccggcctggccggtggtgccgccgccgtcaacgaggacgatagcgtcgaacttgccttcgagcttgagcagaacgatcggggagttgacctcacgctgcagcagcttggaggggaagtactcctccagagtgcggccgttgatggtccacttgccgtcacccggaaccagacggacacgggcgacagcctccttgcggcgaccggtgccgtagcccggctcgatcgcggaggtgccggtaccagcgccagcgttggtctcggtggtgtagttggtgagctcctcttcggtctcgacaacctgggagtcgttggtgttttcagccatgattcttatctcctctcaggtttcacttagcctgctgcgagacctgagcgatctcgaagacctggggcttctgcggggtgtgcgggtgctcagcgccgcggaagatacgcagacgatcgagctgcaccttggccagacggttcttcggcagcatgcccttgacagcttccttgatgatgcgctcggggttcttctcgagcagctcggcgtaggagtcgcgacgcagaccaccaggacggccggagtgcgagtagagttccttgcccatcttgttgccagtcagagcaatcttgtcggcattgatgatgatcacgtggttgccggagtcggcgtgcggcgcgaaagtcggcttgttcttgccacgcagcaggattgcagcctgggaggcgagacggccaagcaccacgtcggtggcgtcgatgacgtaccagtcgtgagtcagatcagctggtttcggagtgaaggttttcactggattaccttttctatatattgtgttccgggctgtcagctgcttggcgcggcttggtcagggccgcatccaagaggcttcaggcctcattatccgtgggctccctgaaagtcctcgatggcgagtgggatagcgctttgaaggaccccttagggaaacacaacaatccactagtatatcgccagtcttgacatagggcaactgtggagacactcccgcttttttatgtcgtctctcccccacctcgcttcgcgaggagccctctcatcagaggggggggctggagtgagtcagttattgaagatttgggcgaaacgttgggcaccgggggtgtcgaagagggtttcgagcggcaccacattgcccttatcgtcggccagcgggatacgccagttcggatactcgttattggtgccgggctggttctgcgcacgcttctcccccaccgcatcggtaatcgaggcggcaagcagcttgcacggagatcccttcagcgcacggtacaacgcatcgatgatgtccgcctcgtgctcctcacggtgttcggcgaaatcggcatccagatatccttgatcaaccagcatagcaatcatggcgttttgctcagccttggcagaagcttggaactcctcagcagggccagtcagcagccccaagcgttcgcgaatcttgacgtgctcatactccaggtatccggcggccggcggcaggtcatgggtattcacggacgccaaggcatacggacgccattgagatggtgtgcggaacaccccgtccctctgctcgaaccattcgaccgcacagccgagaatgccgtggccggacagggaatcggccacataatcgggcatcacgcccaaatcctcaccgaccaccacgccgttggcgcgggacgcctcgatggccagaatgccgagcatgatgttggaatcgtaatgcacataggcaccatccgttgccgaatgattctcaggaatccaccacagacggaacagaccaaggatatggtcgatacgcacggcaccggcacgggcgaacataccatgcaccatgttgcggtaggtctggtagccagtggcttccaaatcaagcgggctcagcggcggttggctccaattctggccctgctggttgaacatatccggcggagcgccaaccgtagcacccttggcgaaccgctcaggattccaccacacatccgcgccgaggggatgcacaccgaccgccatatcagacatgatgccgatttccatgccggcatccttggccgcctgctgcgcagcggcaagctgatcggacgccacccattcgagccagcggtagaagtcgagcgtatcggggaattgacgcttcaaatcagcaatctgctgagaatcccggccaagggcctgttcccaattgtcgccttgcgccgagggcgcaccccacttgtcataacacaggcaccacgtggcataggcttcgaggtcggaaccgaaatccgtcttgaactggtcgaatgcggcctgacgctcggcagtgcgaccggccttgaagataatccacagagcatgcatcttgctgcgccacatggcgtcacggtcaatgacctgggcatcgccgttcagcggctccacatcggagtgcagtccatccacttcattcttggcatcggtcggcaatgtggcgtattccggtaccgactcagggcgaatatacgtgaaattgaccagacgacggctcaccggaagatacggcgacggcgtaagcggagacaccggttcggcggcgtgcaacggattgaccagcacaaaatcagcgccggtcttccgtttggcgtcgaccaatatggtcttcaaatcctcgtaatcgccgacaccccatgatccggaggaccgaatcgagtacagctgcgccatccagccccacaggctaccgtccttcatcgggtcaatcaacggaacctggctcggcgcgctaatcagggtggcgtcctgcgaacggttaccgaccttgacatgcagggtgtgatagccgaccggtacatcggcgggaatgatcagcgatgccgtagacacaaagttaccatccaaatcgaacgccggagatccgtctcccggaccgactccgatggtcccctcgtatgactcaccattctccaggatgatgcttgcagaaggtatctccatgatgccggtgttaacgagcagacggtcttcctcgccgacggtatgcaacactgttggagcaaccagtcggctatggcgttccttcaaaatcctgtgaatggcttccttttgccgatcgtcgtttcgggcttcgatgcctagagcagacaggatttcgatgagcacatcatcgtcgatctcatgataatcgtggctcatgcccacatagctggtaccgatacccaccaatttggccaatcgaatcagcggacgagccaatcgttctttactctcggtattctcactcatagccccagtgtagcgccgaaaagccgcgccacaccgtaagacggccatagaatgcttacgtttgcaacaattgagcaaccatatatcgacatgagaacgctcacatggcggcaaaacggaatctagcgacgactctccaccgcgtgacgcacctccactgacggatcttccgccagcttggccatcatgtccgcagaagtgttggggttcagcgccacggcacgacgaaccatggaagaaagcaccgccggggcgccttcctcaagctcagtgccgagcaacccaagataatccagagtttcactgtccgcagcgggatcctgcgcaccctcgagccgcatcttccaactggtgcgcttgttgcgcagcgcggcatccctcacctcgggaatcggatccttggtcagacgcccgaccagccagttcttatcgtcctcgttggcagccacagccacacgcacggaaggctcgggatccacggacaacttgaccagtacgttcgggaacggcatggtactggcaagaaacacgcgatcttcgaccggcgtgtgcttgttgccagccacggcctcaagcagtgcggtggcacgcgagaacgccgcctgatcgctacgatcaggcagaggacggcgagcaaactcggaaagctcggcagagtcagtggaatgacgcaagcgctcgtatgaggcggtcaacggctcaaaggcggcgccgttggcgtcaccgccctgtgatgcggcggagtcgccgctctgctgggtctcattgatggggttctcgtcggtcatagtgtttagcttagtcatgccagaggaaccggaatgttgaccatgtcgattggttccggagataccgcagcgttgaacgcttctacgacctgcaactcgaattgttcgcaatggtcgacgggcaccacagccgtcagctcgacgttcgccgcatacgattcgtcttcctgccgcccatccagttggctgagcagctgctggaatcgggacaactgcgggtattcaagatgcacgcgataccggcgcgcagtcatgattcttgccacttgcgccgctttcatggccaatgacgccgcggatgaatacgcccggaccaaaccacccgaccccaacaggattccgccgaaatatcgggtgacggcaatcacgcaatcggtagtaccggactgcttcagcacatcgaggataggcttgcctgcagtgccggaaggctcaccgtcatcgctcatgcgctcggacaaacgtccgtccgcgcctccacacaccgcggcatacgcgacatgtcgagcttttggatgctgctcgcggattgaggtcacgaatgcgagcgcctcatcgagcgtatcgacatgagcggcatcaccgatgaactcggatttcttctccacgagggaatcgtgggccggattgtcggatgtgttgagaatcgtctgcataggcggcgtttcgactagacgaatcagtgttcggagacgacgacgttatagtcctcgccggcaaagtaggcgttcatgcaggcgatcatctggcgggtgagctccttgaatgcgccatcggtacgccagccgacatgcggagtcagaacaatgcccggcacatggcagatgggatcatctacggtgagtggctcgtggtcaaatacatcaagcgcggcgggaatgtcgccttcctgcaggcgggcgaacagcgcaccggactcgatgacttcggagcgcgcggtattgatcaacattgtgccgggctggagatgagcaaggttttcagcggtgacaatgccacgagtggcatcattcagcggcaaatggacggaaataacatcactggtttcaataagctcattgagatcgtcgaccggaacggcaccagaccgttcaaaatgctcggcaggcacatgtgaattccacgcggcaacttccatgccgaaggcgcgggcaatgccggccacggtagtgccaatgccgcccagcccgataatacccatgcggcggccggcaagctgcaaaccgtcgccccctgcccatgcccagttgcccgccttgacatccttatcgagttgtccgaccttgcgaatgagttcgaacagcagcgcgaacgtatgctcggccacggcatgatcgccgtaatgttcggcattgcagacacgaaccttaagctcacgtgccagctcgagattgatatagctggcgactccggtaccgcagaacacgatgcacttgacatggccttgttcgctgatcgtgcgcaataagtcatccgagatatggtagccgccgaccaacagggcatctgcgtttttcaggcgttcagccagcacggcttcgtccgaagtgaattcctcgaacatacgcacgcgagccacatcatgcagcgccgggaactgagccttgatgggttcaatcatcgcgccgagcacggcaggcatcacgacaagcggcaaatcggtacgttcgctctgagtttcgtaaatctcggtcatgggcaccacattagaactgcggcgggaaattcactgtgcggtttgctgcgcctgttcttgggtaatgttccactccttgacaacattctggtcggcacccatcgcataaatcacatccgatatgcgctggcgcacttgagcatccttgacctcggtccaacaagtgcccatgggatggtcgctggatatcgctgtcgtgatgcggatcgccttgctcgcgcaggcgatcaatctgccagtcatggtcggcggtcatgccattgatggacaccgtaccggccaccagaccgagtttgccgccgcctgtgggagaatcaatgaccaacggcttaagggaatcctcctcggttttgtatgagccggtttgggcaatgccgtcggcctccaacgtgtcccaaagccgggcgatgccatcggagccttgatcccatgaatggttggtggcatgagtgcaggcgttgtatcccacgttgcgggcggcatcggccacttcaggcggtatgttgaaaatcgggtaggcgctgtaggggccgcctcgttgggcgactggagtctcgaagttgcatacggcgatatcagaggcctgaatgtactgtttcatcggctcaaacagtggatcaaagttgaaggcagtgccatccgtggcaccggtgttggcaccgcggaaaccgttccacaggctctcgtggaacagcaagtcgccattcaccagcatggcgatgcagtcggtatccgggcaatccggcgaattgccgtgatgctccaccaccggctgaggaacggatccggatttgtccagcgacgtaccggcaaccgtgctggttccgggacgagacacatcggttgagtcgttatgcatggcagcgaaccatactcccagccccaaagccacagccaagacggcaacgagcaccgcaatcagcgcaatgtggccggtattcgatgaccatgaacgatgctggcctcgaccgctgatatggctcatatattccccatcccgcgactctccatactcattatcagagtaccgtccgcaggaggcaatacgtcagtattcggtgaatttctcaccatatgccgagttttttcacgacgcgccgtctccataatgccggtaaaatggcctctggaggcggacggacaatggcgtacctccggctccgctaatctggcaatgcgactatcggtagaacagtaacaataagtaattagcgatggatacgaacttgcgagccgtgtacgcaacaaatgagttgccataaaacaaacagacatcatggattgcgggacacagttcatatgaaaaccgtgccccacattttttgcggataagttatcgcattctaataacagaactaccgatacgggtgagttacgactccggtgcgagaaatagaaccaagccagttaagcgatgccttgggctggcgttcaaaagtgtctttatcccaaccgataagaccgaatgtaggcttgaacgacccccattcatagttatcaagcaaggaccaatgcgtgtagcctcgcacatcaataccgtcatccatcgcgtcatgcagtccagcaagggcatcgaacgtatagtcgatacgacgacgatcgtcagcagtggcaatgccgttttcagtgacgaaaatcggcgtatgttttgcgacatcccaagtatgacgcacagcgatgccgagggctggaggatagtattcccagccggttagggtgcgttccacatcatcgtcgacgggcacaggcccgtccttgccgatgaatgtgcgtaggtaggcttgtacgccgataaagtcatcacccgcacccgcttcggtgaagtagtcctcgcgtgggtactgatattcctccatctccttctcacaaccaggcacagcatggaaagcctgacaagcgatggtccagccgacttttgcatcaggcagctcagacttaatgacagcgcgggacatatgatgcgcatcgactagcgccttggaaatcaccgggtcaggggcaggcagggaggcagccacaaagtcagtgccttccgtgccgccttgggtcaaagcgaccatgttcggctcattaatcgtgcagatccacgttacatcgttgagaataggcagcacataactcacgtaacgtttgaacttatcgagtgcatccggtcgtttccatccaccttctgcagcaaaccacaatggcatggtgaaatggtagatagtcaccataggttcaaccccgaactcgtggcaagcgtcaatcatggcgcgatagtgcaacaactcggctttggagaagcaaccttctacgggttcgatgcgtgcccactcgataccgaatcgatacatggtcagaccagagtcggcgagcagcctgacatcctcgcgataacggttgtagctgtttgcggcatcaccggatggttcgctcacgtcagtacgaggcgagtgctcgcgcgcccaccagtcgctggaggtattattgccctcgatctggtgaccagcagtagcggcaccccaaataaagttttcaggaaatacgtaatttagagaagacatcgaagcttatctttcttgtttaattcccgcttatttaatgcccgtcatagccacgccctgaatgaagtagcgctgcaggaatacgaacaagagcaggatgggtgtgatgactagcacggcgccggcgagcagcacactgtagttggtggcgttctggcccgtggagtagagggacagggctactggcagcgtgtacatctcctcgctttgcgcggaaaccaatggccataggaagttgttccagctagacaggaaggtcaggatggacagcgtggccagcgccgggccacattgcggcaggatgatctggaagaagatgcgtagttcgccagcaccgtccacacgagcggcttccatgagcgcgtccggaatgccaccgatgaactgacgcattaggaacacaccgataggctggcacaggaacggcaggatcaacgctgcgtatgtattggccaggtgcatgttcgagatgatgacgaacaagggcacgaacgtggcgacactaggcaccatgagggtgaccatgaccgcgccgaacaagatattcttgccggcgaacttcatcttggccagtgcgtagccgaccatcgagcagaacaccatgttgcccagaacagtgatgaccgcgacgatgaggctgttggtgaagtacgaaccaaagttcagctgggtgaaccattgcgaaaagttggctagtgtcgcgtgctcaggcatgagcttgggcggcttagcgaggatttcacgctgggtcttaagcgagcctagagccatccacaggaacgggaaaatccaaacaatgccaatgaccgccaacacgatgtacgagatgccacgacctttgatgaatcgctgccacaacagcagcttgttgtcctgtgccggtgcagggcatccggcggattgtattgttgcactcatatcgatcccccttagtcttcggaacgcaggatgcggaactgcagcacgctcaccaaggcgatgatgatgaacaacacccagctggcggcggatgcgatgccgtactggccgaatccgaacttctggtagacgtagtatgcggccgacagggtggaatcaagcggaccaccttgtgtcataacaaacgattcctcaaagaactgcaggtagccgactgacagtagcaccgcgccgagtaacagtgttggcttcatgagcggcagggtaatggagcggaaggtgcgccatttgctcgcgccgtcgatggcggcggcttccttgagttcttcggggatggcctgcaatccagcgaggaagataatcatcagcgtgcccatgttacgccagacggtcatgatcatcagggcaggcagagcataacgagtgtcgtgcagccagtccgatccctgtacgccgacgagggaaagcagggagttgagcaggccgtctccctgcaggatgtagcgccatacaacggagacggcaacgacgctggccacgaccggcgcgtagaacagcgcacggaagaaggcgttcaggtgctgggagcccttgttgagtgctacggcgaacgccagagcaatgatcatggtgatcggcagaccgatgagtacgaagatgccagtgacaccaagcgaatgcaggaagcgcttgtcactgaacagggcgatgtactggtcgagtccgacgaagttcacgttgaacggggtacgcaggtcgcgggatgtgatgtcggtgaacgacatcgccatggaggagatgagagggatcagcataaatacgcagaagatgaccgcgaacggcagtgcaaatccccatgcaagtaatgtctggcggcggcgaagggagctgccggctcccttctcctgcgccttcgcgtgcttgaacattgctgtatgtcctgatggactcactcgccgatgccgatggaatcggcttcggactgcaggctcttcagaccatcgcccacagaaacctggcccttggcaatctgttcgtaaatgcggtcagctgcggaggaaacctgtgcccaagtggtaaaagcaggcacgccctgagcatgttcaagctgatcgccaaatgcggttaatgtggtgctggaggtcagtgcatcattgtcccaggcgctctgagcagccggcaaatcggaggacagggtgtaccacttagcctgcacgtcagactggctagcccactgtatgaacttccatgccgcctgcttattcttggaatccttgaaggtaaccagaccggagccaccgaggtaggaagtacccatgtcggaggagtcgtccattgcgggaagcgtcaccgttgcgtacttgtccttgatgtcgtcgccaccgagttcctcgatctggctgacagcagtgggcccttgaagcatcatcggcgtggtgccggctacgaagtcagcgatgtcggcaccggcactcacgtcagcattggcatcagcgataccgtccttgtagaagccggtgacatagtcaagagcctcggtcatcgcatcgctgtcgatggtccacttggtctggccgtcatcggagagtgcagcgcctgcggagtaggcgtatggcaggataccaatgaagcagtccgtgccagaagcaccgatacgcatgccgtaatcgacgccatccactttctgcatggcttcagccatcgtcttgagttcgtcccaagtcttcggcgtttcagtgacgccggctttctcagcgatgtcggtgcggtagtacagcacgcgggtgtcaacataccacggcacgcccaactgctgatctccgaccttgtagttgtcggccggcccttcgaaaaatccactcatgtcaaagttaccggggaccgtagagaaggaattggagaaatcggccatccacgtgttgcccatctgagcaacgtccgggccgttacccgccgcgatggcggtctgaatcttgtcgtgtgcggaagaccacgggatagcggtcaccttcacagtgacatccgtattctccttctcgaaatccttaacgaagtcgccaagcaaatcaccttcgttacccatagcccagatggtaagatcgccggtggccttagccgaatcgattgtggtcacgtcatctgcactgtcagacgtagcgctagtgcgtccgcaggctgcgacgctggtcagcatagccgcactggcgatgatggcagtcgccatcttgaacatgcttcgcttcattcctcgttcctccttgaactgttacttctcaacaatctaaccgcgtagattgtgattaatatttaagcgcatagttttttgtttgtcaactcgcgaaccgattcgacacgacgaaacagcatcaacagtgactccccctgcaggaggtctcaaaagccttatttagccttcttcaagaaatattcagcacccgcagctgccccgcacgatgagcttgaccggcaaacggaaccgttcgggcttgccccacggctcccctgcctgctcatccaacagtcgggccgccaactgccccagcagctccaagggctgacgcacagtggtaagcgtgggagtcagcacctgaccagcgagcacaccatcaaaaccagtcagtatgacatcctgaggaacccggacaccggcatctcgaagtacgctcatgacttcgaacgcagtttgatcggtagcgcatagcaatgcctgcggcaaccgtccagcgtctattacctcgcacagatctacgaaccactcatgcgtgccagacacactgtcatcaagcggcaagtccggaacccgcaaccctttcattttcagttttgcccgcatcgcagcaaatcgatgacgagaatcgtagttgtccagactgcccacaaactccatgtcatgcacgccgtggacatcaaccagatggtcaatcagctggttcatgccagtttcgttgtcacaagagatgtaggccgcaggctcgtcaccatcaccctcgctcagacgcacgataggtatgcttcggcacaaagcctccaatggcatagtgctggtgaattcgtttggaaacactgctaaaccatccacgcgaccagctacatctgtgatacccgcaccatcgtcatgccgaatagcagtacctagcagcacggcacgattgcgacgccggcattccagctcgaatccacgctgcacttcatccacatacaatgggtacgacaacacactcgggcaatcaaagctctcacctgcgcgattggagaaaattggtttcccattctcagacacgacatcgttgccgccagagcatgaatcgaaatcatcctcatcgccaagcggccgctcaataagcatgtcaaaggaatacagaccgagcacgccggtgtttccgcgagccaagccacgagcgttggcgctgggcacatagtcaaggtctttcgccgccctgagtaccttcgcccgggttgaaggcttgaccttatccgggcgacggaaagtaaatgaaaccgtggcggtggacactcccgccttcttcgccacgtcatacaccgttgccctacgcatgattcctactttaatcgattccggaggtcagcacacgttcgacctgaatctaaaaaaagttttagtggctttcctgtcaatctcgcatgcatacttcaggttacgggcgcagcacccaataatgggtaccgcgccttaatgaccgctacacgagcagtctcagcaactggtaaagctgccataggctgcgcacgttgaaatgcatgccatccaccgtggcgcacgcctcgccatcgcccacatggacaatgacggtgcgaccgttcacggtcagaccaccgtgcatcgtgatatgattcatttcgtaacctttggttaggggcgtaagccgataaccacaacaaggcccgatgttcgtagcgtcgggcctttttgctaccagcttccgccggtaacggcccgtcatatcaacggggatgccgcatgttacgacatcactatccaatgtaccagttgcacgaacgcagcctgaatgcctagagaacaactgttcattcacctgagctataagagctgacacgtccataagccggtatttatgttcctagtgcggtagagcaggaaaacagaaagggcctccgagaaatcccgaaagcccttgctcgcggagtcagagggattcgaaccctcgagccgtttacacgactaacaccttagcagggtgcccctatcggccactcaggcatgactccacgttacgcaatgaagcgcaacagcaaaacatcgtaccatgccctgcggatacaacgtgccgaatgcgtccaaaaaaaacgcaagacggccttgccggccaggcagcccgtcacttgcccttggccagggacgcatcaccggaaaaggtgacgatcacggcacagatcaccaatgcgacgccaataacctcaccggtgtctggaatctcgccaaacgccagtcccacagccacggccattgcagggttaatcgattgcatgaccgagaacgctcccgaggtggtgcggcgcaacgtaatctgttccaccgcatacgggatgaaggacgccatcagggaaatcacaaacagcaacgccaacagtttccatggcccgccagaagcaagcgcccatgtggcatcggatttcggatgaatcatatggctcacagccggcacgccaaggaacaacgactgcaccagccagccgacggcaaccgcgatgcacaggttgtcaagcgagttgcctccggacgccacacgacggcctgtcacaatgtacacgccccacatcgagccgccgataaggatggcaatcagaccaatgagaaaattaccctgtcctgatgggttggccagcgagatcccggcctgcgccatagcaacagcatcactgccataaacccgacgcgataccagaccgaatacaacggatcaagctgggtgaatgccagtttggcaatggccatagccgtatagatgaccaacgcctcaccgatcacgatgcacaccacaggaacccgattgaggataccgaccgctgccttcttcataagattcacgctactcgcagagccgggacagtacatagtcggaagagttcggctcggacaacgacataatgtggacgtccctatgagactgcttacaatggtgagcatgagcaccgcaccgagacttgaggccgccaagcgcgattggggtcatgacgagaccggctgcaccgtgctgcatatcgatatggatgctttctacgcctcgctggaagtggcccgcaatcccgggctgaaaggcaagccagtcatcatcggcaccgggccgcgttcggtggtatccgcagcgagctacgaagcgagacgctacggcatcaattcggccatgccggccgcccgcgcccatcaactctgcccggatggcgtgttcctgccggtggatatggcgtactaccgcatgatgtcgcaccgcatcatgcacgaggtctttctgaccatcaccgaccagttcgaacaggtttcggtggacgagggatatatggatgtgtccggcgcgctgctggaatgggacaaaccgagcgcaatcggggcatggatacggcagcaggtggccgaacgattcaacgtgacttgctcggtgggcatcgcctgcaacaaattggtggccaaaatggcttcgaccaacgccaagccaaacggcatgctgctcattccggcggcacggtcggcacagttcgtgcagatgatgccattgcgcggcattcccggcattggaccgtcgctggagaaacggctcaacgcctggggtgtgcattccgtggccgaattggcacaaatggatgaagccgctctcatacaggccactggatcgcccgccgcggcgcgcggactgtgggcggcctcgcatggtctggattcacgtgagatcgcaacaacccgcgaagagaagtccatcggttcagaacgcaccttgaccgaagatacccgtgacatgcacatcgtatgccggctgctgcgttcagcatgcgatgaagtcgcccgtaccttgcgccgcaaaggattggtggctcgcacgctgacagtgaaattgcggttcgccgacctgagttatcagaccagatccttcaccatggagcagccgaccgatacggcaagcacgctgtatcccgaatgcgtgcggcagttgaaaattatgcttggtataccggcgaacgccgaaccgaccactcccctgccaaaactcatcaggctggcaggcatgagcacatcatcgctcagtgaggcacatgctaccgcagtgcagccgtcattagacgatctgctcgaagaggccgatgacgcacacgggcagaccacacaggcgcgaatgcatgacgccgaagccgcactggatgccgtgcgccgcaaattcggcaacacggcggcacagttcggggcgtagttaggccatcagacgctggcatgcagcgtcaatggcatcatcggtggcggtggcggagaaacgcagatactcgggggcaccatagaactcgccggggctgggaatgatgcccaactgggcaagctcggccatatccgaccagcaatcaccagacttggccttgacccacacatacagtgcacctgacggcatctgagcctgataaccataggcattgagcgcgtcgaccaatgcgaccaatcgaccccgataacggttccactgcgcatatacggagccggcgtcgttcagtcctgcggccatggcggcctgcaccggccccggaatgatctggccaatctgtttacgatattcgcccatttcggcgaccagccggtaatcgccggcaatcagtgcggtgcgatagccggccatgttggactgcttggacagcgaatacagcaccaggatgccatcggccgagccttcgcatacctgctggttgagcgcacacggcgtggcgaacaggctgaacgcggcatcagaggcgggctcgttggatgccgccgcaggcctggaagtcgtattgcgcgccgaacgccagtccatgagcgcgtaacattcgtcggagagcactactgcgccaatgcgtcgggctgcagcaacgatgtcggctagccaatcggcggaaataacttcgccggtcggattgcacggcgagttaatccagatggctttgacattgggaatgttgacccaggaatcgacatcggtcacgtcatcgaccttggccacggtagcgccggcaagctgggtgccgatttcataagtcgggtaggaaaccttcggctgcaccaccacatcgccctcgccaagatgcagcaagctggccattaatgccactgcctctttggagccgacggtgggaatcaccgccgcgttcacggctttcaaatccacaccgcgcatattgcggaaccacgaatctatagcggatttcaaatcgacagtgcccgccgtgaccgggtatccgtgggcattcgacgcatccgccgtagaggccaacgcctgctgcacggcgtcaggaaccgaatccacaggcgagccgacggacaggtcgatcatgccgcccggcactgccttggccgcggccttgaaaccggcgatgcgtgaccaatcgtacggcgacgaatatgcatgaaagcccatgggaaccctttcttggacgatatgttcctaagatacgacgagccctcggcctattgaccgagggcttgcattacatgattgagcgaatcagctcactgattctgcggcggcagcgcggccacctgctcgggatccttgccaatcggaccattggcggaagcaccaccaagatcgcctacttcggcaaagaagctgacggctgcgtccttgtaccaggcccactcatccggcagatcatcctcatagaagatggcctcagtggggcacaccggctcgcaggcgccacagtcgacgcactcgttcggattgatgtacagcgaacgagaaccctcataaatgcaatcgacggggcactcgtccacgcaagccttgtccttgacatccacgcaaggctgagcaattacgtatggcatggaattctccttacgaacaactttctacaaaaatacgcgcgcgttaggacgcgcccccgacacctcagccgttaacggcccgatcagtctcgtcagatagcgtttcgctcaaatctcccttaccgagacgagcgtgccagtaaccatagctgaagtagatggcgaaaccgatcaccagccacaccaggaaacgaatccaggtgagcacagacaggttcaacatcagccagaagttggccaaggcaatcagaatcggaacccacgggttgccgggcattctgaaggcacgcggcaattcggggcgtttcttgcgcataatcggaatggagatggccaccaaggtgaatgcggacagcgtaccgatgttcaccatgtcagaaagcacgccgatgtcgaacagggcagcgaccagggccaccactacgcccacaacaatctgcagaacggccggggtgccatgcttgccggtcttggacaggccacgcggcagcagaccatcgcggctcatagcaaagacgatgcgggtcaagcccagcagcagcaccataatcacggtggccaaacccagcacaataccaaagctgataatcttggcggcccagtcagccccgaccaattcgaacgccgtggccagagacgggctatcttgcttggcaagatccttataggagaccatgccggtggtcacaatggccacgagcatgtacatgacgataatgagcagcatgccgacaccgatgcccagcggcacgttcttgtgcgggttcttggtctcttcggaggcggtggccaccacgtcgaatcccaggaacgcgaagaacacaagcgccgcaccagacaggatgccaggcacgccgtaaatggacggggtcatgccagtggcccattgccatagcggctgcgccatctgagcgctgacggcaccgtcgccggtagtggctgcggccggctggctcggtggaatgaacggggtgaagttggaggccttgacgtagaagaagccgacaatcaccacaaacaccacgatggcgatcttgagcacggtcatcgcgccatccacacgagcgccaatcttggtgccgaacaccagcaacacggtgaagaacgcgacgatgataattggcgcgaggtcgaagttgaaggagcctagcgccagatcggtattcacgttccaacccatcagacgtatgaaatcgttgagatacacgccccagtatttggcaatcaccgaaccggcgaacagcatttccagaatcagatcccagccaatgatccatgccatgagctcacccactgtggtataggtgaaggtataggcggaaccggccactggaatcatcgaggcaaactcggcgtaacacatcacggccgcgccgcagacgatgccggcaatcaggaagctgatgatcacggccgggccggcgtggaaagccgccgcctgcgcacctactgagaagatgccagcgcccacggccacagccacacccatgatggacagatcccaccacgttaggctgcgcttgagcttgcgaccctcttcacctgtttcggcaatggtctgttcgacggatttcgtacggaacagttgcatgatattgctctcttctcccctgcctacacgccggacgcgcgcagcactgaaaatgagtataaatgggggtgattacgttgtccatcaatccgttatccagtggaatcactggtttgccggccaaacggccaggcgatcatcgccaagttttctgcggggaatcacagcacgccgatacagaccggctccggaaccaaggtgacgccgaatgcttcccgaactgcctgctgcacggcccttgccagggcttcgatgtcagcggcgctcgctcccccacgattggtcagggccaacgtatgctgcgtagacagacctgcaggggtgtcctggctgatcttgtatcccttatggcagccggcatgatcgataagccatgcggccgaggtcttaacacccggcgttccatcaggcatggtcgcatcaaaacgaggagcatcctcaggcaatgcggcagcctgctgtgcggagagtatcgggttcatgaagaacgagccgcagctgtggcgattgtagtcaggagcgggcagcccatcgctgccagccgggatgccggcctgattgttcagggcggcgagacgatccaaatcagccagaatattggcctcacgcttggcggtggccatatcggcaagcgcgtagcgggtgggatcttcgagcatgcccttggcggcacgaaccgcaagtacggccttacgaatatcggtggtggccatgcgatcgcccacctcgacgccgagcgccttggccaattgcccatagccgaccgtgccttcagccgaatgggtaagggcaaaggtaacggatagcaccacataacgcggggtcgggaagaaccggtcggcaggcttgccgggcccggcatacatgctggccttgagtgcggagtaacggtatccgaactggagatcggcaggagtcaaatcgcgcgtggttttggtttcgcggtcccagacctccaccgattccaccgaagtggcaacctcctggccataggcaccgatattttgcaccacagaggcaccgacggtgccgggaatgccggatagtccctcaacgccttcaagcccgagttccacggtgaacgccacaaaatcatcccagttggcgccggcctcggcattgacatggaccgtgcgatcgccgccttcgaccggtgcggcctcgtccggcacggtgatcaggcagcgcgcatctcgcaccaccacgccgttgaaggggtcatcggaaacgagcatattggagcctccgccgataacaaccaaaggaagtcctttggaatcggcgtcttccacggcctcgatcagtccgacgcgcgtggtcggctcgacgaagtgggcgatatgtccgcccacacccatggtggtgatgtctgcaaagcttgtcatggcttcctatcttagtgtcgcacgagcgatatcgaggcaatcgtcgtctgagacagcagcaagtcccatacgcaaaaacccggccgcatgggccgggtttgaaacataatgctgtgcgcgcaatcaacgagtctcgcggtgcacagtctgcttgccgcagcgcgggcagaacttcttcagctcgagacggtcgggagtgttacgacggttcttcgtcgtaatgtagttgcgctccttgcactcggtgcaggccagcgtgatgcccggacggatgtcggcgctcttagccattgtcattcacctctgtgttcttataaggtttagtgcgcgcccaccggttagcgggcgcgatttgtagcgaggaagaggctcgaactcttgaccttacgattatgagtcgtacgctctagccagctgagctaccccgccagagagccccgagtgagaattggactcacgacctcttccttaccaaggaagtgctctaccactgagctatcggggcgtggcggatagtggattcgaaccactgaagcacgaagcggctgatttacagtcagctccctttgaccgcttgggaaatccgccagtctgtttcccgccgcggtgtttgacctcaacaggcaacttggctatataaccacaaaacccagacaaacgcaaatcggtgcgacactccgcaaattcccgcgtttttcccggatccacataggccagtcggagaaatcaggaagcgaccaagacgacgcactcttcttggagtcatcagcaccggctttcttgctaccggcatcgttggcgttatccgtagaatcggactgtgcggaggcatcgtcggattgaccgtcaacggctgagctttttggggagaatatgcattccctcggccccctcagtcgcctacggcgacagttcccctcaaagaggggagccaagacacaagacgcaaaaaccccgactgttcgcaaggaacagtcggggttggtgaagttctctatacgactaatcagccgagaatggcaagaatgtcgcgggaggagacgatgaggtagtcctcaccctcgtagtgaacttcggtgccgccgtacttggagtacagcaccttgtcgccgaccttgacatccaccggaatgcgctcgcccttgtcgtcacgacggcccgggccaacagccaggacttcaccctgctgcggcttctccttggcgttgtccggaatgtacagaccggatgcggtctgagtctcggcctcggcctgcttgacgatgatcttgtcttccaacggtgtgagcttaatcgacactgtgggtcacctcgtatctactcgtagttctaatgccgcgccagaacacctcaagaggctgacgatcacttgcgttgtccctttgcgctaggacacatcgtagcgcgattgttagcactctgccaactcgagtgctaacgctgtgagagaaatcccttagttgccgcggcgggcaagaatggaatcaagccccacgctcaacgattcagacgtggcgaccggggcctgcacctcagcacgctcctcatgctcatggaaggattccggctgcgcagcactgtgatccgcttgagccttggctgccgaggcgtcgtcggaagccttgacggccttggcctcatcaatcagcttgttcaccatctcaggctcggcgggagtggctttggacacctgacgcgtcgacttgatttccaagctttccggagcgttatcttcagcatggtccgcacccagagagaaggagatgagatcctgggaggtggccatatcgaacacatccagcgcacgggccggctgaacggaagcgagctccgacgtggcatcgtccgcaacggagtcatgcgcatcgcgctcatcgcgtaccgtcagggaaggtgtctccgcttcggaatggtcggcagcctgcggcgcagcagcctcccgatcggccttggcttgtgcttcacgcagcgccttggccttggcctgctcgacttcagcgtcatgcagcacacggcgaatctgacgctgttccatcacttcggtggcagcatcatctgcacgactcgtctgaacggccggagcggcggactcggcagcatggttcttagccggagaatcaatctgcccctgctgagcaggagttgcagacgtcttcttctgctcatagcgggacaccctgcgttcccactgacgggcctggcgtgcggcattcgcacccattgccagcaccgctgcggtcagggccaaaggaatcaaagcgaacaacgggctgtaatgcacgatgaacgccaacgcaaataccactatggccacggcgagaaggctggccaccagaatctggcgacgacggatggattcacggcgcaattcgcgtatatgcgcgatatgctcggtcgtcagccgggctgactgtgtcgatgctggcattgctgcccctttcgcctgatacggctcgatatcgccgaatcgtctaccgtcttccgcttccacaatacgcagggacggcgaataacgatcttgccgatgctcagccgcgcgcttcatgccgttagccgtacgcgcgggcaaccatacagcgatggcaattatcacaatcaccaagacgacaaccgtgctcagtgactcgtaacccataccgtcaagaataggagacatattgaccgaaccaacacttcccgctcgggcgtgtcgggagtattaggagatttattggaggttttgcgaggccaatcgattggcgaacccttgcccggcatcctcggccaacagcgcaaaggtcacgtggtctcgccactgaccattgacgtacatatagcgctcgcgcagtccttcatgatgggccccgaccttgcgcaccaccgctaaagagcgcgcattgtccggcaaaatggcgatttccagccggtgcagaaccgggccaaagggatccgtcagtgcccagtcggcgagcaaagccacggccatgggggcaaaaccatgaccggcgtaacactggtcaacccaatagccaaccacaccggtgcgcatggatccgtaggaaatcgcccccaacgatatctggcccacaatgcgcatctggtattcgatggcgaacaacgcccccaccccatgctgctcgttacggcgctggcgctgaatccactgattgaaggtgatgaatccgccatgcatcggatctcctgattcccacggggcaagccaatcattattgcgccaccgcacctcattccactcttcctcgtcgtccaaggtcagcggcctaagcgttatgggaaaagcaggatgggaaagacgaggcatacgaatctgatgatccggcttgaacgcctctttgatggattggaaaactgacacggcctttattgtagccatgctaggttgtgcggtatggataaggcaacgctacggcacagattgctggctcaacgagctttgattacgcctgaggcccggcttgcagcaggagaaaaactggttcatcagtttcccgcatacgtgttggatcgcccctgtattcactacggctccgctccactgacggtggcggcatatgtgtcgatgggatccgaggttgagactcgtccgctgttggcttggctgctagcgtcaagaatccgcgtgttggttccgttgttgggatccggcctggatatcgggtggagtgcactggattcgatggaatcactgcatccagtggcgggttctggacaccggcggcctgacgagccgcagggaactccattgccgcctgaagcgttgcacgatgccgacctgattatcgctcccgcattggctgtcgaccggcatggcaatcggctgggacgcggggccggctggtatgaccgcgcattagtgaatcgtcggcccggctgcccgatcatcgcagtgtgctggccttgggaggtggtggacgacgatgagtggatcgcggacccccacgatgtgccagcggatggcgtgctgacgccggaaggataccggcagctgccctgattaccggcgaataccgaacataagacggcttttatctcgcctgcgtatgcctgcagggcaaagtgtcagggcggcgactaggatatgaacggttgtccagcatgacgacaatgcctatgcgtgagaattgacttgtggaggaatccgttgcctacttatcactaccgctgcaagaactgcggctatgacttcactgaacagcagtcgttcaacgacgacccgatcaccgtatgcccgaagtgtgctcaggagcaggtgcgcaaggtgtattcggccgtaccgatcgagttcaaaggccacggtttctaccgcacggataagtccggcaagtagaaaaaccgacctgacaagctggaaccacaatggtcgtttcagcttgcaccgagagataagcgcaagtcaccatgatgttcatggtgactttttctatattcacgccacccacgcatggcttactacggcgccgtcgtatgctgcatgccgcgcgcaggtgcattgccgcgttctgcgccggtttggccgtgctgtttggattgggaacagtactggctcaggtgcagaccgctccagtggtgattgccgaccggcctattgcgcgcggcgagataatctccagcgccgatatcagagtggagctactgccggtcagtacggttggatcgtcttatgccacagatgccgatgagatcactggactgattgcgcagattgatattgcggtcaatgatcccatctctacgcatatggcacgagatgcaccactgccgcccaccggcaccacggtgattgaagtgcggttggccagcaatccagatgatctcttgcccggagacagcgtgcagctggtgtccgccgtgggatgcgccggggaggattgcgtgctcgctgaggaggcgctggtgatggctattggcgaggctgaagcatcgtcacttgggagcaatgaacgacaggtctcatttgctatgaagcctcatgccgcggctgcagtaatggagttgcagcaagccggcgcgatagtcgccgtgatgcggtgaccgtctcttgctcccgccggcgggagctggctcgcgaagcgagactgaaggtggactgttctcccaaccaccccagtcggctttatcgacagcccccgccagagagggcgactagcgcttgtcgttgaacacagcccaatgagctgagccgtatagcagacagcccggtgggctgtctgtaggcgaagtgagcggctgcactacaagcagccgcgaaggccgccccattgggctgacgttcaacgcttgtcgttgaacacagcccagtgaggcggcaactcgccgagaatgcgcttgtcatcgtcggctcgacgctgctggtcggtttgcatgtcgccaggctcgagcttgacaccgtctgcatcgaagctttcagtgcccttcatcactactcgtttatgtttgcgtggggtgcgccttgtagccgaatattccgccatgtctactcgacttcgcgatagatctcgccgatacgggccacgatgcgatcgacttccttatccgggttcacgaatgccgcaacgctccatacactcatgacattccaacctagagaaatcaaatcctgtgccgataggcgatgacgcttgcgcgtggactgcacggacatgaagctggcatcatcggtctgcaccgccaacgcgaacgggcgacccttaagaccgacgaccaaggggacccttggacccctatcgaaaccgtaattcacagccgcttcaagaccgcgcgcccgcagacgctcggcgatatcttcgaacagtacgttctgaccggcatcatcacgcgtcggcaatatcggacgatcgttgaattgctcagcccaggccagcatggtcttcaggaatcgtgggccctgctggtggagacgctcatcctccatatcctgagagccaaacgccgagacgatatccaagttgcggtcggcaagcgccaatgcgtcgagcagcatgccacgtccgccctcgtgctccaccacaccgaactgctgcagcaagcgaccatgcaccgtcttggcatagcacagggacagaatcacgtcggtggcctggcaacccgccacgtcacgcagcggaaccagccgcacatgccgcaggaatcggcccatcggcttgttcttggaggccaacgacttcaattccgcgcccagacgagtgcggaatacatcagtcagcgtcaccacggtcagcacatagctggaaggcaccacagtaaagctggaagcccgctgagtgataaggtgcaccaccttatcgatctcctgttggctggattccacaagaccagacagcatgaccggtacgccgttagcgtcctcgaccgaatggaaacgcaccttgcctgatgccggctcagtcgccacatcataccgaaccgaaccatagccctcagattcaaggaatgcagtgagacgcgggtcgcggcgggtcggagcggactccacttcaacatgaggaagcaaatcaatcagttgcttcacggattcactggtcaccgtagcgcaatgggcaatcaccactacctgacgcacacggccaagaatcgaaagcaattcgatggatggaatatgcgcgcaggcatccacaatggccacatccgcaataaccgcggggtcggtgagtgcggccaaagtgcccggcgtcgccacgagtatcggcttggcagcagccaaaatctccggatagtcacggcgaatacgactgagcgacacatgggcacgaccggctaacaccgtatgcaactggttggcctcctgtgtatgggagaacaacatatcgcacaaacgccgcatcgattcctgagataccatcggccccacggaacgcacatgctccacatcgacctgggcgaaccggtcggatgcggtttgcaatgcggaaccgtcctggttggaaatgatggcggacgaacgcacgatatcctcaaacaccgtggtccaccatgccagttgcacttcgccacgaatctgcggcacactcacctgacgagtatgcagatcctcgaccaattcgttcagtccgacaccggcgaattcatgttccaagcggcatcgttccggcaaggtatcaagagccttacggtcatcaagcaaggccttcagacgcacctcgacagtattgaaatcggtggatcccaaattgccgcccgccggagtcgtggcgagcacggtgtcaagcgcagtcatatcgctgaccatcgcatccaatgtggtgatgatgtcgtccagcttggtggggagcaccggccatccgccgtgtggcacgaactgcctccactgctccgactgccgagccactactttgagcgcttcatgcaggtcttccacctgggcacccacgcgcagcagacccttggcctccttgatatgacgacgccgctcccagaagcccatcgcgcttccttcagccttgcgctgagccttgggcttggtcgcttcaatcatcgaatcgatgtcgcgctcgaaaatctccggctggaatacgtcgagcacgcggcgcaggttcttgagcacggtgacctggcgctcccattcgcggatggttgagggaacggggaatccacacgtctgtacggtacgagccacctgctcacgggttgcgggaaggaaccgacgcagcaaatcatccacgcgctggtaggctgccactgcctcctcctcggtgttcagggaggccttgtaccaggcggtatcatccggcccgatggagaattcgccgagttcaccggcccgctccaacttgccgacccatgcttccatatcgccggcaacggcaatcgcgctctgttcggtcaggcggatatgcgtggcgggatgcgtgggcagcacggagatgcgagccagattctgaatcgtctcgtaagcagatacgttccacttatcgtttaccccgtgcaggtcgcccaagtaccgggtcaggcgggagcgcacgcccacaagttcatcagcaagctggtcgaagcgctgggtggccacaccttgctggaatcccacagcggaaatcaactgcttgtcaatggcggcgttggcctgcgcatcagccacatccaacatctgagccttcagctcattggcggacacggcttgcataaacagtcgcttctgttcggcgactcccggcacatacagcaccgaccgaccactcatcaggcagcgcgaagcgacggctaccgcctgctctgccgtgcctttggggaactctccgtcaatgacgatgctatggcccgcggctgcaagcgatgcggcatatcgcacggtgttgtcaacatcgcctacctcaaattccgcatgcggatctgcatcgaacgggctgtactgcgcaagatcggcatctttgagggacgactgcgcatgttcgttaccagcgagtgcatcaagcagcacattgtcgctttcgccgttctccagctggtcgatgaagcgctggctttcggcaatcatcaacgatgagggatccacaaagcagcccagcacgatttggcgctcgatattgaagtcaggaatgcgttccacggcttccgccgtgattctggcgaacatagccgaggtttcaggctcgccactgtcatagctggaaccgtcaaacagagaatcctcgtcaacatatacccgctgctctcgcagcacattgacgaatgccgtattcaacttcacacggccggtgaactgcacagtggcggcggattcttccttgggcaccgtgacgttgaccggatacagcagcacgggcagtgcattgcccttccacgtggccacaccaaccaccaacgagagctcggccactccggacacacggcgcttggcggtctggtcatccatgacccgagacaagtgccgttccgccgccttcaacaccccggcatcacggaacagcgagtccaagcgaacatgtcccgaagcgaacaattgtgcaatgccggacggatgggcatgcgtcatatcaagtttggccaccagctggttcgcgtcctccaacggagagggggccaacatgccgcgatactggtcacgccagcgacggatgcggttcagaccgttttcagcattctgatcctgcgtctgggtcatctcttggctcactttccaaccgcttcgcggtattcctgatatcccttgttatgggatagagcttcgtcgatgtcggcttcgcctctggcggcgagccaagcatacatatcgtcatacaggtatgggttcattgccagaaatgccagcaactcagggtgacgagcaatctcgaactgcgtggagaaatcctgcgtggttttagcatcgtccgaggtcaggccatcaacttccaccaccggctcctgggccttcagttctcccttgctcacacggtcgaacacggagcccggctcaaaagctggtgtatagacaccagtggtgtcagcctcgcccaaatcggcaacgcttacttgaacgggctggtccgactgatcggactgatcgggttggacgaattggccgggctgctcaaataccggcgactgctcaggctgtgcctgcacatccggctgctggtccgggatggataccgcctcagcggatggtgcagtctcagattccgtctcggttgctgtttcagatgcggtcccagatacagtcttgggcaccttggcaacaggatgagcgatcgcatccaccggcaccacggcaggtgcagaaggctccgccggttcgacgggttcagcttgcgggcttgtctgcggcacgaaatcagcggcaggctgggtctgctgcgcctcaccgtccggcacggtatcttcggactgctcggccatcgcatcggcgaacaaatcacgcggagtggccggctcttccgccttgaccacggattgggcaatgttcagactgctgaagtcgagttcgtcaaccttatgacgaacgctggcggcgctgaacgcagcggtcggctcaccggcccgcaaatccaaaatgtcgtcaacggacatatcagcggcatccggctcctgcggtgcttcattcaccgcgtagccgaacaaatcaggcaccggaagctgctgatcatgctcgacgtcatcgatacggatgaagtccgccggaacatcaccgaactgcatgcgcatcggcgaggacggcagcataaactcggcgtcaacgggcagacgcagtaaatcgccattgtcacgaaccacataagagccattggtcgagcctaaatcgcgcacggctgcagaaccattctgcttcacctcgaacacggcgtgccttttggacatcgacttggtctgatccaccacatcaagacgctgcatgccgtcatcggctagaggacgcaatggcttacggccaatctccacgcagtcgcccggtttgacgttgactcgatcaaccccattgatccgcaccgtccattcactcaccgtgaccgcctccctatacacactatgaaccacactatgtgccattgtgtcatcttttactcggtttcgccggattatcccggtcaagaattgcaacttttgcgcattagcagcttccatgccgccagcaacgggtggaatcgctccccctattcagtacagggtctgcccaagggcacaatgcaggaaaccccgcaatccataacggatacggggtttccggcaacaagttggtgattgcggcttaagccgcacaaatcacttgagctcgacggtggcgccagcctcttccagctgagccttagccttctcggcgtcttccttcttagccttctcgaggacggccttcggagcgccgtcgacgaggcccttggcctcagccaggccgaggttggtgatggcgcggacggccttgatgacctggatcttcttgtcgccgacggcggagaggatgacgtcgaactcgtccttctcctcagcagccggggcagcagcgcccggagcagcaacggcgacagcagccggagcggcagcctcgacgtcgaacttctcctcgaaggccttcacgaactcggagagctcgaccagggtcatctcgccgaaggcttccagcagctcatcgttggtgtacttagccattatggcttcctttcaatcttggcggcggacgaagtaggtgatccgcagccgaataaaccttgtttgtttaaattatcgaagcaactgattcatgccgtgagggcgtaaatcaggcagccttctcctgcttgtcgcgcagggcgtcgatcgtacgcacggccttggtcggcagagcgttgaacaggtacgcggccttggccatcgatgccttgacgtcgccggcgaactcggcgagcagctgcgggcgagacttgaggtctgccagcttcttggcgccctcagcatcatagacagtgccgtcagcggcggcacccttgatgacaagagccttgttgtccttggcgaagtcacggatgaccttcgcagcctcaatgaagtcgcccttcacgaaggtgatggcggtcgggccagcaagaatctcgtcgagaccctcgatgcccgcttccttggcggcgatgcgtgccagcgtgttctttgccacggtgtaggaagtatcgcggcctagcttttcacgcagatcggaaatctgcggaacggtaagcccgcggtactcggtcaggtagacggcgtcagcgttacggaattcttccgtaagctgagcgactaccgcttccttttcgggcctcttcatggcgttccttcctaagtcggccgttgacttggagttcggaactttcggctgggcaacaaaaaagccctgcgcacaggcagagcaatataatctcgcgaagcgaccttcgccggcccttgacgggcttatatctctcaacctgcgctggcttggcgaaccaaacttcgaaagtgcacttgcgcacacttcaaccaacggtctgtggtttacgaatgattaggttacgggcggtcggcgacattgtggaattcgggcgtgtcgcgcaggcagcacccccaggagagtggcacaacaaagtcctcccggcccagcattggcgcaacattcccggagaagtgatgcaggattacaacgtggcggcatattgagccacggatgccgtgacttcctttaggtaatcgagagaacgacgccaatggccgggcacctcaatcgaatggttggcgtctggatattcatgcacatgcggggtcaatgcgttggcgcgggcgcgatcatagaacgggtcggcggttccggcacaaatcagcggtgccggtccagcatatcgggagctggcggcgtgtgactgcccggcaagttcagcacggattatcgccttcgcttcggccacggatggtgcttcggattcggctacgatgtcatcgcccacagcgggcaccggaatcacgcgggcggatgggtcgaaatcggcgtggtgcaataccggggtcaacagcacgaatggcaacccataatgtgcggccacgtgcgggtaagtcatcgtggtcagcgatttgccgatgagcagcagacgcgggccggattgattggtggaatccgacgaatcagcatcgtccctaccgacattatcgttggagtattcgccggactgatttccgcgcactgactccacccacccatcaatcgcctgattgagcaccggaatcactgtggacaaatcatcggaggcattgcgtacatttatacgatcgacacgccacccggcctcgaccaaggcttgtgcagaccagtacagcagcggacggtcgcagttgtagccagtgcctggcatgagcagtacgcggccgtattcctgaccgaacttgacgacgttctttttccatgaggtgatgctgacttcgacagccggtttcactgcgcgacttccttccgcggcactctctgcgcgttcctgtatatgtattgccgcagtcagtctaccccggcctgttcacgttacctccacaagctataatcggccacggttctgattggatgcgcagcgccgcacgcgcgccgggcaggtcaatcagggcgagtcgcaattctcgccggggccaaccgggtcacccacaggtggcatatggcctcgcacaacccaaggaagtagagagtatatggagaagttcttccatctgaaggaaaacggcacgaccgtctcaactgagattctggccggcctgaccacgttcttcgcgatggcctacatcatcgtcgtcaacccgcagattctgtcgcagaccggtatgccgtggggcggcgtgttcctggccaccatcatcgcggccatcatcggcaccctggtcatgggcctgttcgccaatgtgccgtacgcgcaagccgccggcatgggcctcaacgcgttcttcacctacaccgtgtgcttcggcctcggcttcagctggcagcagaccatgtgcatggtattcctgtgcggcttgatcaacatcatcatcaccgtcaccaagatccgcaagatgatcatcatggccatcccggagtccctgcagcacgccatcggcggcggcatcggcctgttcgtggcctacgtaggcatgctgaatgtcggcttaatcaagttcactcccggcgatcctaaagccgccgctaagggcggtgccgtggccgcaaccccgggcctggccaacttcaatgacaaggtactgtgggtattcctcatcggcctcgtgctggccatcgtattcaccgtgatgaaggtcaagggcggcatgctgctggccatcgccgtcaccaccgtgatcggcatcccgttcggcgtgaccacctggtccgactcccagtctctcggccagaccttctccgaactgccgcagaccttcggggcgatcttctccgccgaaggcttcccggccttgttctccgacccggccaagctgccgctggtcatcgtgaccatcttcgccttctccatgtccgacaccttcgacaccctgggcactttcatcggcaccggccgtcgtaccggcatcttctccgctgaggacgagaaggccctcgagaacggccacggcttctcctccaagatggataaggccctgttcgccgactccatcgccacctccatcggcgccatctgcggcacctcgaacaccaccacctacgtggagtcctctgcgggcatcgccgctggtggtcgtaccggcctgacttccgtggtcgtggcgatctgcttcgccctatccgtgttcttcgccccggtgatttccgccgtgccgtccgccgcgactgctggcgtgctggtcatcgtcggctgcatgatggccgcctccttgaaggaagtcaagtgggacgatatcgccgaggccatcccggcattcttcgccgccgtgttcatggccttctcctactccatctcctacggcatcgccggtggcttcatcatgtactgcatcgtgaagacctgcaagggcaaggccaaggaagtacacccgatcatctggatcgtatccgcactgttcatcctggacttcgtgtgcatggcgattctgtgatgttggtttgatgacggcggtgaatcacgtcgttctaggctgatttgccgtaagccgtaacttatctagggccgggctcgaaatgagtccggcctttgttattgcagatatttaggtactagttagcagcgttgcaggtataaaggaacttcttagagccgtatttgcctccttcataggcccgaaatacctgcaatctacttaatggcgtctttatacctgcaaattcgcgtcataaatcgacctgaaatacctgcaaatcttatggattatggcggatggccgatattctccctgcaaatagacccaaaatgcctgcaacctatttatgattaggcgacccgaaaaaccattgcaggtattttggcactatttaggatagtatgcaggaaatttcgatacgaaaagccccggtaagcagcttgcctactgagcctttcgacaaataacgggtctctctggcccaacaacgaacaaaaaaagacccgcctctttttctacgcacaaaccactacgctgcgcgcagggaacgaatcttctccggtccagcaattacgaaccgtccggaggccggactcaacatcaccttcgctcagctatcgcttcgctcacggatcagccaaaacgaccggagatgtagcgctcggcttcttcgttctgcgggttgttgaacatcgtggtggtgtccgcgaagtactcgaggtggccgggctggcccacagccttcaggttgaagaaggcggtgtagtcggcgatacgggcggcctgctgcatgttgtgggtcacgatcacgatggtgtagtcgctcttaagctcgttgatcagatcctcgacagccagggtcgaaatcgggtcaagtgcggagcagggctcgtccatgagcagcacctgcgggtggacggccacggcgcgggcgatgcacagacgctgctgctggccaccggacagaccgatgccggggttgtcaagacgatccttgacctcttcccagaggttggcaccgcgcagagcccactcgaccagatcatcggcatcggacttggccaggtggtggttgttcaggcgcacaccagccagcacattctcgcggatggacatggtcgggaacggattcgggcgctggaagaccatgccgacgtcgcggcgcacggccaccggatccacatccttgtcgtacaggttcttgccctcgagcagcacctcgccctcgacgtgtgcgccggggatgatctcgtgcatacggtccaaggtgcgcagcacggtggacttgccgcagccggacgggccgatgaaggcggtgaccttgttcggctcgatgttgatattcacatcctccacggccaggaagtcgccgtagtagatgttctcgtggttgacgtcaatacgttgtcccatgatgtttccttatatttccttgtatctttaagtctaacggctcgctcagcgatcggtcttcacggcgaagaccttcgccacgattcgaccaatgaggttcagcagcagcacgacaatgatcagcactagagcggcggcccacgcacgttccataggaatcgtggtcacgcaggtggaggcagcgttaggcgggcagttggcgctcagcttcgagtactcctgatagacgaacaccggaagggtggtcatctggccggagaacaggttcacattggtgttgacaatgtaaccggcggtcatgagcagaggggcggtctcaccaatcacgcgggcgatggccagaatggcaccggaaacgatgcccggcaaagcggtacgcagcacgattttggtgatggtgcgctgcttggtgacgcccaaggccagggatgcctcacgcaggtcattcggcacgatcttgagcatttcctcgctggacttaaccacggtaggcagcatcagcagggagagggccaccgagccttcaaaaccgttgatagtaccgggaccgagcaaaatcgtaaacatcgagaaggcgaacaggccggccacaatggacgggatgccgctcatcacgtcgacgagcagggaaatcgtggtggcaagcttgctgcggttcgcgtactcgaccaggtacacggcgcacatcaggccaatcgggatggagatgaccatggcacccgcggtgatttccagcgtaccgataatggcgtgcagcacaccgccgtaaccaccggatggagtctggctgccaccaaccacaccggtcatgttgtaggtcaggaagttgaggttcagacgcttgatgccgttgacgatagtggtccacaacagggaaaccagcggcacacaggcgataatgaacgccagcgcgataagcacccacatgaagatatccatgctcttgcggcgctgcacggaggaacgggtggggcggaaacgatcgaaatcgatcttgggagcaccgtccatcggagtcttttcagtattctcagcagcagtcatcacgcagtcgctttctcggtgatcttgcgggcaatgaagttgaccacaaaggtgatgaggaacagaatcagaccggttccaatcagcgtggagacgcccagctcgttggcttcaggatactgtgcggcaatgttcgcagcgatggtctgattctgcgaggcctgcagcagtttgatggagtaattgagtcccggggacagaatcatcaacacggccatggtctcgccaagcgcacggccaagggccagcatggaggcggacacaatgccggacttgccgaacggcagcacagccaggcgaatcatctcccacttggtggcgccaagcgccagagcggcttcctcatgcagacgcggagtctgcatgaaaatgtcgcgggacatggaagtaataatcggcagaatcatcacggcgagcaccacggccaccgtggccacggtacgcgacgggttcgcagcagggccggcgaacagcgggatgaagcccagatgattggcgacccaattccagaacgggtagatggccggcaccaaaatcaggccaccccacagaccgtagataacagaaggaatggcggcaagcaaatcgaccacatagctcagtgcggtggcgagcttcttaggcgcatagtgcgagatgaacagcgcgatgccgatggagacgaagaaggcaataatcagagccagcacagagaccagcaccgtgccgaacagcaacggcagcacatagccccaaaaattgttggccttaccgccggtgaagctggacacggtcttgctgttggcaacctgatcgccgccaatcaacggccaggcacggaagaacaggaacaggaacacagcggcaagaacaaccagaatcaggatgccgcaggcgtatgccacaccgcggaacaccttatcggcggttttgccgccgactggctgcacagccgttttgtcttgcgaactcacggattctccttatataggatggttatcaagtattcaagtggcacggttttcgtcgtcaaaccgttcggcccctgacccgctttaagccgcagccgtatgtgtttacgactgcggcttaaagatttcgggctattacaatttcaatagtcttgtattcaattatcgtttcaggtcagtggttcagcaaccctttgcgggtcggccgctcacttggtcttgatggccttgatggacttggtgatctcggacttcagggaggagggcagcggagcggtgccggcggcatcctgagcggccttctggccttcgtcggaggtcacgtaggtcagccaagccttggcgaactcagcctgcttggtgtccttgtatgccgggcagacgatgtcgtaggataccaggacgatcgggtaagcgcccttggcttcggtggcgtggttgatcttgatgacgatgcggttgtcgcccttcacagtgtcgtcctgcttggagtcctcgatgaccttggagccggcctcagcggagatctcgttgtaggagtcgccgaccttgacggccacggtgcccaggtcgccgacctgggagaagtcggcgtaaccgatggtgccatcggcctgcttgacggtggagaccacaccagaggtgcccttggcaccctggccaacctcgttcggccagttctcggacaggtcgtaggtccaggagtcaggagcctgatccttgaagtaggagacgaagttctgggtggtgccagacttgtcggaacggtgaaccacggtgatcgcggtgtcaggcagggtcaggtccttgttctgatcggcgatggccggatcgttccacttggtgatcttgccgtcgaaaatcttggcgatggtgtcggcatccatgttgatgtgcttgccagcgtcggagacacccttgaggttgaagatcacggcgatcggggagacgtagaccggcacgtcgaaagcagtgccatcggcgcacacggacttggactgctcgacctcgtcatcggcgagggccttgtcggaaccggcccatgcggtggcaccggtcaggaaggtctgcacgccagcgccagaaccggacgggttgtaggcgatcttggcgtccgggttggcgccctggaagccggcaatccaagcttcgacggcggactgctgggaggaagcgccagcgccctggaagttaccggaaatcggagcggtcttggaagcggaatcagtggaggagctgtcggtcgtggaagcggtgttatcgccgcaggcggccacggaagcaagcatcacaatgccggacagggcggcaatggagcgaatgaggatgttcttctgcatgattatttcttaatccctctatcaactattcgcgggcggctcttgctgcccggtcaactcatgacaactacaagattattggtggttttggggtctcgaaaccgaaatcagtaaacagaagatgaacagttggatgtttgtgggtcacataaccgctacgtagtttttatcaccctgacccttcacgggaaagaagccatcatacgaaaaggcgacctcgaaaggtcgcctttcatcatccggcaaacgacctttactccaccggggcgtcgatcttgtagccaagcccgcgcacggtggtcaaatacttggggtgtgccgggtcttcctcgattttggagcgcacgcgcttgacgtgcacatcgagcgtcttggtatcgcccacataatccgatccccaaatgcggtcaatcagctgatgccgggtcatcacacggcccttgttctgcatcaggtattcgagcagctcgaattccttcagcgggaagaacacggtttcgccgcgcaccgtgacctggtgctggccgacctgcatggcaatgtctccgcacaccagcggaatatcgtcgtccaccgtgccggaagcctgcgccgtggcctgattgcggcgcatcaccgcacggatacgagccagcagctcacggaacgaatacggcttggtcacataatcgtcggcgccaatctccaggcctacgaccttatcaatctccgcacttttggcggtgagcatgataatcggcacgcggctttgctcgcggatacggcggcacagtgcggtgccgtcgatgcccggcagcatcagatcaagcagcaccaggtcaatgcctcccttggtgaacagctccagaccttcctcaccggtggcagcagcggacacgtcatacccctcgcgtgtgagctggtacaccagcggctcgcggtaggattcctcgtcttcgacgatgagaatgcgcgtcatagtggcctttcttgggtatgttcctgtacgcatcggtgcaaaagtatcagacactatcgtaaccatgagttctccattaccctgttgtttcctggaagtacgtaattgcggatacgcgctacgcgccctgcacggcggtaggttcctcatctgcaggagcggccggcatctcgatggtgaacgtggagccctcgcccttgcgtgaccacaccgagatccggccaccattctcctgcacgcaatgtttggtaatggccaggcccaagcccgagccaccggtttctcgcgagcgggctgggtcgacgcggtagaaccgttcaaaaacgcgatccaatgacttctcgggaatgccaataccctgatcgaccacgcgaatggtcactttgccatcgcgctcccccacaccgaccgccacagtcgtgtgctcaggcgagtaatgaatggcattctcgaccagattcttgacagcggtttgcatggcatccgcatcagccataatcatcagctctgtttcgctcggctcatcatcgccttcgccagccgaaatcggcacgggtttgccgttgacattaagacgaatatcaatatagcgggcatcggcctgcacctgattgtcattgatggccgcgcgggctacagcaagcgcggaaatgcgcttgacatcaatcacgctaccttcggaagattgcgccttctgcaaatcgatgaggcgacgcaccaattcggtcaaacgcgcggattccttggaaatacgaccggagaaatagcgcacggcgtccggatcgtcggcggcatcggtcacagtctcggcaagcagcgagatcgcgccggccggagttttcagctcgtgggacacgttggtaacaaagtcgcgccgaaccgcctcgaaccgacgctgttcggacatgtcattgataaagatggcgtacaggtcatcgccaatatcgccaatgcgcacgcgcaaatacagcatgttggatggcatcgactgccccgcttcaagcccccggccgtttgaggaggggaagacactgcgattgaccggcatctgcacttcgcgctctcgcacaccgccgtcggtggcggcttgggtcagaatatcttccacttcgcgagagttgagccggttgccggaaaccaggccgaacggcaccgaaccagggctggcatattgtactcgaccattacggtcggtgacaattaacgcttcgggcagcacttcaaccaatcgacgctccgtaggacgcacgggaacatcgtcgccaaacagacacagtgcggtctcgtcagatgccgcagcctgctgcgcggacacacgcccggaaacacggcctttgttataggcgataatggccacccacgccactaccagcgcggcgagcaccacaagcacgatgatctgccagatatccatggtttccagagtaaaacgtgcaggacgtagcttagtgcccaaactacgtaagttcgcctattgttcatttttggcgggacgaatatagcgaagctcccgctggcgggggctgtcgaacgcagtgagactgggggcggtcagggaaccaaaatcccagcggccatcctcagtccgcttccgcagacagctcccgccagcgggagcacaatatcgggagcaatttacagctcgtagtccttgtccttgctttccttgatcaggaacagagcgagcagggcgagagccgccatgatggccatgtaccaacccacaccggcaacgccgaacttggagttgaccagcgcctgggcgatggtcggggcgaacgcgccaccgaagatggcggcgaggttgtagctcaggccagcgccggagtaacgcacgtggaccgggaacagctcaggcaggtaagcaccgcaaggtccgaacagaccgcccatgagcacgaagccgatgcagaggaacacgagaatatgtgcggcggagtgcaccagcaggaacggggtgaagaagctgaacaccagcgtggcggcagtcacggcaagaagcaccttcttgcggcccaccttgtcggcgtacacgcaggaaaccacgatgaagatggcgaagaacaccacggagaccatttgcagcagcaggtattcgctctgctggaagcccaaacccttaacgccgtaagacagcgaccaagtaccaagcacgtagaacagcgtgtaggtgatgcccatggccacagtgccaagcacgacttccttccagtacggcagcaggtcgcgcagcgggtgcttggaggtgcgcttttcttcggaagccttctggaacaccggagtctcagacatacgagcacgcacgtagaggccgatgatgaccagcacaacggaagcaaggaacggaatacgccagccccaggcgcccatctgctcctgaccaagatgagtggtgagcagcaggttcaggccgtacgcgcagaagaagccgatcggggcgccgaggttcgggaaggaaccgtaaagggcgcgcttggaagccggagcgttctcggtggccaccagagcggcgccggaccattcgccggcgaggcccacaccctggcatgcacggcacacacacaggatgacaacagacacgccgccgacctgctcataaccgggcaggcagcccaccaggaaggtggcgatacccatggtcagcaaagcaatcaccagcgtcttcttgcggcccatcttgtcaccgaagtgaccgaacagcatggagccgaacggacgagccaggaaggagacagcgaatgtggtgaacgccataatctgagccagtgccggattggtgacgttggcgaagaagatcgcgccgaagtagctggcggctgcgatggagtaacagtagttgtcatagaactcgatggcagtacccaccatcgaagcggcgatgatctcaggaaccgaatccttcttcacgggttccgtcacggccgcagttgcacttgcaggcataatcctttttctctcctcacgctgcgcataaaccttaacgcagcacatgcattgcatgttcaatgcttcgcgacagtgttgccatcgctcaaagaattgagcacagcgaccggcatgcgggagaaagactggttatgacttgtggccccagcgatgaacccccacacatcgctgtgccgcacactgagtatggctcagctgatgagccgagggcttgagagcgttcacatagtgaacgcgtcttatgggtcggactgcctaacgcccctacagacgcttgacgatatcgacggcgagacgggcggcggtatcggcgtattcggagatgtcgaattccttgaacacctcatagtcggtgtcggcattgtcagaaagcgcgcgaaccaccagagcaggcacgtcattgcgggcggccacctgggccactgcggcaccttccatttccacggcatcagcaccggtaagacggacgacttcctcgaccttttcaggcgtgtccacaaagtaattgccggaggcgatgatacccacgatgtgggtgatgccggcctcggcaagcgccgcgtcagcaacctccagcaggtggtcgtcggagtggaattcctcaaccggggcatcggcagtgccgggcttccactggcccacgagtcgcatgtcggtgtcgaggtagcgcaaggtgccgccgagcaccacgtcattgatatgcagatgggtgttgaggttgccggcaatgccggtgaaaatcacggcatccggagcgaactcgtcaatcagcagctgcgtggtggcggctgcattgaccagccccataccgcctaccgttgcggcgaccttaatcacgtcggatccaaaagaatccacggtgccggagacgatgtcaaggctgcccttggcggtgtgggtcacgtgcgtgagcgatttggcaatcagcgccacttcctcgtccagcgcgccgataatagccacggttttcatacccatacgtaagttcctttcatacaggctcccgctggcggggggctgtcgacgtagtcgactgggggggtcgttaaggtgtctcgctcaaaccacccccagtctcgcttcgcgagccagcccccgctagcgggggcataaatggctcagtgccaccgccgcgtcgccacggcttcggcaagttcgcgcagtagcgcttcggtgtccggccagctaatgcacttgtcagtaatcgacttgccgtacaccagctggtccagtggcgcggccttctgattgccgccctcaatgaagctttccatcatgataccggtgatgccttgttccccagccgcaattcgaccggcgatattgcgcactacttcggcctgtcgatgctcatccttgccggaattgccatgcgagcaatcgatgataaggccatgggacgcagccgattcggcgggcatttcggcacgcacgtcacccatggccttagccacggattcggcatcgtagttcgggccgtacgcggaaccacgcaataccacatggcaatccgggttgccgagtgtctcgactgcacaggcacggcccaagtggtcaatgccgaagaacgtgtgctgttgggcagcggcgaagcaaccgttcacggcggccttgaccgagccatcagtggcgttcttgaagcccaccggcatggacaggccgctggctagctgtcggtgaatctggctttccgtgttgcgcgcgccgatggcaccccagctcaccgcgtccgagatgaactgcgggctagtaggctccagaaattccgtggcagcggccaagccctcatccaatacgccgagcaaagtcttgcgcgccagcaacaggcccttcttgatgttgtggctgccgtcgatatccggatcgttgatcaggcccttccacccgacggtggtacgtggcttttcgaagtacacgcgcatgacgataagcagctgctcgccgagctcattcttcagcgcagccaatcgatgagcatagtcaagcgccgcctgcgggtcatgaaccgagcaagggccaacgatgaccagcagccggtcatcttgaccgtacagacatgcacgaatttcgtcgcgcgaataggcgacaatctcctgagccttatcggtcagaggaagttcggcaagtacctgagccggcgtgggcagcggctcaagctccagcaccctgcggttgatgatgcggctgacacctacctggtcctcccagcgcggcacgtcagtggcgatgagcgggttcttgccctctcccatggcctgacgaatcgcgcgaagctcctccggcgtattcaacggctgcgggccgacctgcaacgggtgcgtggccgtggcgctgccatcctgctgctgcataacatctctccttggattactatctttcccaaggatagggtgtcacgggaacaaacccagattgtcagcgatggagcgcgcggcgagtcgtgacggcgtcggccagcgtgtgcaaaagctcgttggcgcgatcccacggcacgcaggaatcggtgacggactgaccgtacaccagttgatcgagcggggccggcttctgatggcctcccaccaggaagctttccatcatcacaccggtaatgccctgttcgccggccgccaaacgttcggcaatctcttcgatgaccccggcttcacgattctcatccttgccgcagttgccatgggcggcatcaatgacgaggccatgctggctggggccggacgccttggatgctttcagatcctcgagcgcctggcgcacggatgcggcatcatagttcggaccatggctggagccgcgcagcaccagatggcagtccgggttgcctttggtctcggcggaaatcacacggccatcaagattgatggataggaagtggtgctcaaatcctgcggcatagcaagaatcagcggcggccttgatggagccgtcggtggagttcttgaagcccaccggcatggataggccagaagcgagttcgcggtgaacctggctttcggtattgcgcgcgccgatggcaccccagctgatcgcgtcgcagatgtactgcggagtgatgggatcgagccattcggtggccgtgggcagaccgaggctcagcacgtcggtgagcaccttgcgggccagccacatgcctttgcgaatattgaagcggccatccagatcaggatcgttgatcaagcccttccaaccgatggtggtacgcggcttctcgaagtacacgcgcatcacgatgacgagacggtcttcgagctcacgcttgacggcggcaagcttttcggcgtattcgtgcgcggccttgggatcatgaatagagcaggggcccacaatgaccagcaagcggtcgtcgcgaccattgagcacgtcacgaatctcctgacgggagtgaagcacgagctcgctcatctcatcggtgagcggctgctccttgaggaaggcgcgaggtgcgggaatggggtcgagctggcgaatattgacatccactgtctcgggaaagaccgcctgctcccccaaacgacgttcgtcctctgaactatcaggaccacgcagtgctgccattgctcgactcctttcttcttctatgactataagttaggcctccgtgcgtgttgcacgaaggcctaactatagcagtttgtttatgctcgcgctctccgagccccacaattacggactcgcctttcagctccgtcctgctggccgagaagccgggaaaacagtccactggacagttttctatttccggcttctcacattggccgacgcacgcttcgcgtgctacttagccaatgcgcccatcggatcccaagccggaagcatggtggcgggctcttctaaagccttctggtattcggctgggagcatgctcttcgggacggcgacctcgtagacgtactcagtgaaccagtcgtcggacatggtgaagtagcccttgtcggcgatcttggcgccccaggagttctccacgcgccagcggcgggtggtgccatcgtcggcaacgtccacaccggcgaatgccatggcgtggttcatggcggaatcgccgaagcgtacgcgggcttccttatcgaggtcgaagtctacgtcgtataccttgccgtactcgaacagatcggtggcccaagcgccggattcacgatccatgaacgggtggcagtcggcaccgaaccacaccggaatgccctgctcgaccagaatctgcttgacgcagtccttcatgaactggttcggcacgttgaggtactcggtggcgtcgccgccggccacgttgccgaggtgctcaataccgatcttcttgcccttggcgtgctcggcgcgcgggtcgtccaccaggcacacgtagtcctcaagaccggcaggccccacgtacttcttccagaactcgaccggcgtaatctcgccgtcgcggtggaattcgccgtccgcgtcagtccactcccagtcgaaggagaccggcggctcgcccaggtggatggtcaggatacggtggccagcagcagtggtctcggcaatgatctgctcgaccttggcggtgtcgccttcggcagcgtacatgtgcgccacggcggtgtgcagcaggtgacgaagctgggtgttcatctcgccggtgttcttggaggattcggtctccgggaacagatccttgggcacggcaccgtacttcttgtacacgttcatggccatggtccactggccgccgtcgcccatcacgtcggcgagcaggtgctggatcaggcgggagtcagcaggctcgccggcctccaccagagctgccacatccttgaggaagtagttgacgcgctccagcttgtcgtagtacatcgcgtagttctgggagaactcgaactccttcaagttcatgttcttcttggcgatgaagcgggccacgttcagggaactgaacaaccagcagcggccggagcgatcctgatgggtggcctcgccgttatccacagtggtggagaagcgacgctgcagcagacgggcgcgatcatagttgcgggccaccttgtcgattccagcggcggtcaccgcattcatggccaggcggctggtgccgtcggcgtcaaattcgctgcgcagagtgttcagcgcttcgccagtcaaaggcgtcaattcactcatgtctattccttctttgggttcggtacgcttgtggcgcaatgttcacaacgattacggcacctggcgcagagcacaggtgccgtatatcttgccgttagtagtctaatcgatggcttgtcattcagcctcgggctcagacggttccgactgaccggcctcgtcgccctgttcggcgctctgtccatcggtttcggcgtcatcaggctgcgcctgttcgtcatccgattcctgctgctgttccggaaccgggttgaccaccggcagcgaggcagcggcatcgccggaattatcggcgctgagaccgaagccggagaatgcctgggcgaacatcgcacgcagttcggcaacgcgctgggtaatagtggcctcacgcgactgcaattcggcaatgcgcttggccagcccgtcaagctcgctttgagccgcgttacgacgctcctgaatctgattgtcggcgtcctcacctgccttgcgcacgatctcagccgcctgttcgtcggcctccttacgcttatcggccgcataggagtcggcctcttcacgggtgttcttcgcctggccaaccagttcatcggcctcctgcttggcggcagtacggcgctcctcgaggttggcgagcaactcgttgactttcttggtggcctcatcctgctgagcggcaatgtcggcacgaatctgttcgacctcggcagtgacctggctcatcgtgctggtgcggttgacctcggcctcgtcggtgatctcctgagccttggccttggcggtatcggtgatctcgccggccttgcgctgggcctcggtcatcatcttggacacctgctcgcgtacatcggccagcttcttgttggcatcggcgagcgccgcttcgatctggtcattggaatcggacttgagcttggcgatttcctcgttggcgttcttgcgcagctcggcggtctgcctggccgcttcggccttcatctcggcgatttcgcgctcttgcgtagagcgttcggaggcaagcctcttatcgtgttcctcacgggtgttgctgagctcaagttcaacggtctgacgctgctcggtgacgttcttggcggtctcagcgcgcagctgggcggcatcctcgttggcggcagtggtgattgatgcagcctgattgttggcatcctgcaggatggaagcagccttggcattggcatcatccacaatgtgctgcgcgtccaacttagcgttgttaatcaacgtctcggcttgagcttgcgcggtcgtgcgcgtggaggaggcgtcctgcttggcgcgttcgagcagctcggaactggtctgctcggcggaagcaagcatctgctgagcgttggcgccgagcgacgcgaacgtgttgccctgcgacttcttattgcgctcctcctgcaattgggcctgcaattgcagaatgcgatcatcatccgcggcaatctgctctcgcatgttggccagcgtgcgatgggcctcgttcacgctatcttgggcaacctcgaatgccgcgtccaccttctctttgtcgtatcctcgcagcaccaccgggaaacggtccaccatgtctgtccgtcctttcacatacgcaacttggctcgtcctcaagcactgtagcgcatggaagcatgccgaagctggggacggcgaacatcgttacaatgcgtgcgaaacgtgttcggttttggtgtgtcggggtgagactcaggcaatgaggatatcggagctggagggcttgagatagtatcgcacagcctcgcgcaccacgtctcgcccagcggcaatctgctgttccagcggcaatccgttctggctagaatgcgccggccctaccaatgggaagctcacgaatcctcccagcacacgttcctgagtggcggtccaattgagcaaattgtagaacagcgagttgcatacgaatgtgccggcatcagagcttaaggtggccggaatcgaatcgtcggcaaagtcattcaaaatcgagcgcaatggcagacgcgtccagtaagcggccgggccgtcgggatcgatgggctcgcgacgcggagtcacattgtcggcgtcaggtttggccgtatccatcaaattggtggcgcagcgttccagcatcacaccacgggccgaatgcttgagcccagtggcgatgacaatgtcaggcctcgtggcctcgatggtctctttgagtgtgggccaggctttggcgaaactcaccggaatgctgaccacatgaatggtcacctcaacctgatccaacgggtcgtccggactggaggcaggccccaaaccctgctcggcaatggccttgggcacctcgatagccggattaacgtccacaccgtcatagtggtcgaatccggaaatcacaacattgagttcacgcatattggtaagtctaatatctcttcacgggtttggggaggtcagcgcatctgacctgcggcttgggcgaggagcgcatgcatgcgggcgcgcgcctcttccttgggatcgcgtccctgaatttcctcggcgatatgttcggcggtgggcacatcttccagcgtggtgattttgagattcgtctcgctgccggacacgatggcaaccggctcgtcaggcagatagtcgaccactacccgagtgtcatcggtggggtggaaatccgggtcggatgcggccagttcgtatgcacggcgaatcgtggcgaatcggaacgactgcggtgtctgcgcacggaacgtgttcgggcggtccggcaccgatttgaccactttcacatcgccgagatcctcggtcagcagcactgtatcagtggaagcatatgccactgttgcggcggtgaactggtcgagcgcgtcaatcgacccctcgatggaggactgctccacaaacggtcggacggcatcatgaatcaggatcttggcatcatcgggaataccggcggccgccaacgtgtcaagcgcggcggcggtgctgtccacacgttcggcgccaccgtcgataatcacgcgcactttggtgtatcccatatcgtcaatcagtgattcgaccgccgaacgtaccttgggattgaccaccaccacgatgtcactgacacgcccgcaatgctcgaacgcctcgatgctccagcacacgatgggcttgccgcccacagagacaagctgcttggggttgtcggggtcaaagcgggtaccgaagccggccgccagcaccacggccaccaccggcgcggtctgtgcgggtcgggcggctgcggtttcaggaatatcggagtctctctcagtcatagccaccaccgtaaggggaggtccggccgttcgtgacctgcctcacagctttctccacggaatgtgcccgctattgccgcacgatgagagccagcaggcggccttcgtgggctttgttggcaagcgaggcacggcgatgggagtaccagagcggattctcgagcgtgcacatactgtggttgatgttgccgatgcgctccgcaagctcggccgccccctcaccgtcggtgcggcacagttcagcaagttcaggatccgcctcgaggtattcggtcgcagcatggatgcgcggcatggaatcaaccacctgatggacaccggcaaaggcgaggtcaatcattgcagcttcggcgatatcaatgccggcaccgccgaagcgtgtctgcgttttggtcaacgggaaacgcttgacgaactggtcggcgacctcatcgcccacctcgtagcaatcaccgcagatacgcgggccgagtgtagcaatgatgttcgtcggatcggcccccttgagcttcatcagttccacggtggattcgatgatgccgcgttcaaggccacgccgtccgcaatgagccgcgccgatgacgccggtgaccgggtcggcgaggagcaccggcagacagtcagccgcgaacatacccagggcgatgccggattgtgaggtgacttgcccgtctgcctcgatgacctgcgacacattctcagctgacccagtgggttcggtcggctcgtgcttacgaccatcggcatcagtctccatgccacgacccgtctgatattcctccacactccggtgggtgccggatacatcaaaaccaaatggggtgttgacaacgaaggaatcatccacatccacagccacgccggaatgcacctgcgagaccagcgacaggcgtgcatgcactgcttcagacaaggcaatgcggttcgacatcacggcctgtggattgtcgccggatttgccaccgaggttcagattgccgtaatcaccggcgctcagccctcccagccgcgtggtgtaaaccaccgtgataccgggagctagcgcaatcggaatggtcaccggaatcgggcgaccctccttatcagtggagctgatctggttggaatcgaggatctcgtcactgtattcggacatcacgcgctcctttattgtctctgttgtcttattatctcagttatctgtggctcagcgccagaattttcggaaatcaatggctttgtcccttaatttctgtcgcttaccagctctcagtgtcaggaatttaggaaatgagcccccatctcctaaatttctaacgctgaacacgactcagcgaaaggatttcaggacgaatgggacaatttcctaaatctctgtcgctgagatagccgtgacgaaggaactccaccggtaatgcggtcttaatcgccgcattcaatcaatggcttccggttcttcgtccgtcaaagctattcggctttgagggtgggcttcttggtacgcgaacggatggcggcgttgatgggcacctgatgcgggcaaggcatcgaaaacacatgcgccggattattgatggcgggcaccggtgtgccgtctgcatcgcgcagaccgtcttccggcacaatgtatgccaacggacgctcaccgggtaggaggaattcgacttgctgaccgggttcgattttgttgcggctcatcagtgtgacgcggccgccttcgtctgcgctccagctgagcacttctccgactaccagccaggaacggaaataggcggagcggtcagtgttctgcgtgactttgtgctcggggtagtagaagccggtggagtagtcacggtgggccactttgtcggtttcttcgagcagccactctggcagttcgacgtgaggggccgggcggacggctgcgtgcttccaaccggtctcaatctgttcgacggcggtgttggacttgcgacgcgtggaacgggcatgcgaactcatgccgtcgggctccagcgcatcagacgtagcgacggcacggtcatagccttcatcggccacaccggcgaatgcggcgtcggcattgcgcattacctgatcttcggttccctggccgtaatcagggtcggacgggcggatcacgcggtcgtggaacggcagcaagatattgccgtcagcatcttcaaaaccgcgctgaatcatgtattcgttgacggcggtcttgtaggcgttggtcatcgcggcgatgtagtaggcgcttttcgcacggccttcgattttgaggctggtggcgccggaatcgatcagatcgtcgaggtggcccaacatgttcatgtcctgtgagttgaacaggtaggcgccgttttctgtctgctcgatcgggaagtactgtccggggcgtttctcctccacaatcgagtacttccagcggcagggctgggcgcattcgccgtggttgccgtcacggccggtcaggtagttggagaacaggcaccgaccggagaacgccatgcacatggcgccgtgcacgaagcattcgatgtcaaggtcatcgggaatgttggcgcggatatcgcgcacagcctgcaagtccatctcgcgggccagcaccacacggcgagcaccgagctcatagaacgcgttggcggcctggtagttggtcacacccgcttgggtggaaacatgcagttcgaggttcggggccacttggcgggccatcatcattacgccgatatcggagacgatgagcgcatccacgccggtgtctttgagctggccgatgtattcgcgcatggcttcgatctcgttgttacgtggcagcacattgcacgtcacatacacgcgggcgccgcgctcatgggcgtagcgcgagccctcctcgaagtcctcaagactcaggtttttgggggccgagcgcatgccgaacgctttgccgccgcagtagacggcgtcggcaccataatcgaccgcagttttcaggccgcgcaagttgccggccggagacagcacttcgggctttttgcgtgtggggattctcatcgtcgtattcatcaccgcaatagtgtagtggtggccgtgtaatgcgggcggggctaccgttaggctgggaagcatgaaaatcgatatcgtgagcgtgtttcccgagtattttgaggtgatgaacctgagcctgatgggcaaggcccaggccaagggattgctggacatcaaagcgcataatctgcgcgactggacccacgacgtgcatcattcggtggacgatacgccggtgggcggcggcgccggcatggtgatgaagcccgaagtgtggggcgaatgtctggatgagctgctgggactttcgcagcagtctgactcggtcccagctccaggtattgcagctgactctgacaccgatacgaaccaatccgacgatccggtctccgctgccaacacgcaatcggcatccgtcaacgttcccgtttcttctgacggctctcctgccgaaagtgacgtgtccgcccagctaagcgcaccagtgctcatcttcccgaacccgtcggccccgctgttcactcagcgcgacgccacggaactcagtcatgccaagcatctgctgttcggctgcggccggtacgaggggtacgacgcgcgcattcccgactactaccgttcgcagggcatcgatgtgcgcgagtattccattggcgattatgtgctcaacggcggcgaagtagcggtttcggtgatgttggaggccattacccgccttatgccgggcttcatgggcaacccggattccattgtcgaagagtcctacaccggcgagggcgcgctgttggaacaccatcagtacaccaagccggccgtatggcgcgatatcgccgtaccggatgtgctgctttccggagatcatggcaaggtggatcgctaccgccgcgatgaggcgctggcccgcaccgccgagattcgcccggatttgattgcggcgctggattgcaaggcgttggataaggccgaccgcaagaccctgatggctttgggttgggaggtctccgccgcccacccgcgcaagttggagtaggctacgcctccggctcaatcgcctcaatatagaacacagcggtttcgccgtagttgcgactttcggtgattttccaaccctcaggggcctgcggatcctccgatcgcaccgaacgttcgagcataatcaccgtgttggtgttagcggcgctgcccgccgccaagtcggccagaagctggttgcattcgtcggttccgtaagcgtagggcgggtcgataaaaatcacatcgaacggctcgccaaaaccgccagtcacctgctcggcctttttagtgagcacacgggctttcagcgaggcgtcccaagaacggtttttctgcagttgcgcgaacgtcttggcgataagcgccgccgcaggtcgggaactttccacggccaccagttcacgtgcgccgcggctcaatgcctcgatgcccagtgcgcccgtaccggcgaacaaatccagcacacgggcgtcgcccagcacaccccatgaatcaagatgggagaaaatcgcctctttggtgcgatccgtggtgggccgggtgccggttttcggggtggccagtgccgcacccttgaatcgtccagaaataacgcgcatgtctaccagcctagcggctgctcggaaccatcgaactcattaatacggcctttgcaatattctgactgacggccggcttccccgcggatctctcataattgaggcaatcaaggcacaacaatcgtcaatctggccttcgaggggctgattggggcatttcaggaggtctatctccgtttcaaggggctcctcaagcacgaaacatcgagtataaacggtctaacgataacgtcattccgccgttttgtgtccatgtttactcagccaccagccccttgaaacggagatagacttccgggcaaccggtgtatctgcccctcgaaaccgagaaggcctcagctggaagtcaaaaacgtctcgttgcctcgggtgaagtcgaggaccgctccggcaagctggacttcgccggccagttcggggtcggcttcgagcagctgctcggcacgggtacgagcgtcggcgatcatgtcggcgtccttgaccacgcgcaacagcttcagactggacttgccaccggattgggcatctcccaacacgtcgccggcaccgcggaattccaagtcggcctgtgcgatttcggccccatcaagcgaattgtggatgacatcgagtcgttgttcggcgggcgagcccggctcggcacgggagatgaggaatgcccacgaattggtgccaccgcgccccacacgaccacgcagttggtgcaactgggacaggccataccggtcagcatcgaaaatgactatgcagctggcctgcttgacgtccacgccaacttcaatcaccgtggtcgagaccagaatcggggtctcgccactggcgaagtcggccatgacttgggttttgacatcatccttgtctcgaccggtcaatgtggcgaaacggatgccggcaaactgcgggagcttctgcaatcgatctgcgatttcggctaccgagtgcaacggcgggcggactaccgtctcaccattgtcgtcgaaagtctcatacggatcatcaatgccaatgtcatcggccgatgcgcgggatgtccgcgaagaagccgcccgactggatcgcccgcttgaacccgttgaaagccctcgcgaacgccgcgcggaatccgctgccgacacgccgccgtcatcttcatcatccgtatcgatgcgcgggcagacgatataggcccgctcccctgcatctacacgcgcacggatatgcgcgaacatacgccccatcgtgcccgcgtcagcttcgttaaccaccaccgtgcgaatcggtttgcggccaccaggcagctcagtgagccaggaaatatcaagatcgccgaaccaagtcatggcggcggtgcgcggaataggcgttgcggtcatcaccagcagatgcggcgtggtgccgtcatcggttttggcattgagactttcgcgctgttccacaccgaatcggtgctgctcatcaatgaccaccaaagccagatgtggtgcttggaacgtcttggagaacgccgcatgcgtagccacgataatgcccggctcgccactggccgcagcagcaagagccttacgccgggctgcgagtttcatgccgcccgttagcaacgtgacagaaacattgaggtcggcgaccatcttgccaatagtctcaaaatgctgttcggcgagcacctgagtaggagccacaagcaccgcctgataccccgcgccgaccacttgcagcatggcggcgagcgccaccacggttttgccggatccgacttcaccctgcaacaggcgttgcataggccagtcacgagccaagtcagcggcgatatcttcaactacctgatgctgaccagcagtcagttcaaatggcaaggatgcgatgaaccgatcacgcaaattagttacggccgtcgtgctggctgcgccggtttcattatcgccgtccaacaggcacggatgagcagacgacttatgagcatgttggcgggccttcagtagcgatgcctgagagacgaacgcctcctcgtagcgcaacgtctcaatggccgctttgaatcgcacggtggagtccgggtcatgaatggccaagaacgcctccgccctgtgaagcaggcccttggccgcgcgtatggatttaggcagaatatccgggatggactgggcgagtgtggcaaccttggactcggattcctcgccgtcctgcaccgcgatgttgtcgatggagggcgcgacgagctcggcgggcatgctttggctttcaggcacagatgatgtgcgcgcacccatcatccacagcagtcccagaatcgtctcgtgaatatgttcggacgagatgcgtgagctggcgtggtagatcggccggggacggcagacgcgagtcagggcatcgggcacggtatcggcatcgtatttgagcgtcggagcggactgagatgaagcgccagcgtatggggcgccaccacctgcccgtgcagtcgatgcggttgggggatctcctctcccggtcactgccactgtgccggatgcagcaggtgcaacggtgagcaagtccggatgggtgaactgcagctgccccatatattcgctgggcataccggagaccaccacggtcgtgccagcacgcaatcgcgtgctcacccaatcgacgtacgatttgcgataggagaagaatgtgagccgggcaagaccgccagccatattgcgcgaccgggcgaaggcagcatcatcgaccgtggcctcaagacgataaccccggcgagcgttcattggtattacgcgcatatcccgtatggtggcagcgaatgccatagtctggccgggaacagcctcgcgaatcgtgcgcagcggcacaggctcagtgacgcggaaaggataataggtgagcgcttcacccacagtggtgacgcccagcgatttgagcgcggacacgcggcgcttgttgggaaccaacgaagcgagtgcggtgtccatggtgatactcatagcgctccattctatccgtaagccctcgaacggcatcacctacaacaaaacccgccgagccgaagctcaagcgggttttgcagacgttagtacgttagtacgcgattcacgcggccacgcgctgaaccttgccggccttgaggcatttgccgcacacgcgcaggcgagtgttctcgccgtcgatcgtggtgcgcacggactgcaggttcgggcggaagctacgcttggtacgacggtgcgaatgggaaacggtgaaaccggtctgcggtcccttgccgcacactgcgcaacgagctgccatgatggactcccttaaaccttgatgtgtcaagtctttcacgtatccggtcgctggttttacccggcaggccgaacacacaacttcacaaatatatagctcaataccgacaaccgcaactcttgcgtgtatcatagcccgactcatcatcgcggcaagctctgcatcagagctcgtatgaagcctctattcgccgccatcccgcgcgctacgccgtccgcgaatcgccggcagaacagtcatattatccaatacaacacgccaccttgtctattccccatccagcaaactcccatataatttcggtataagagatggcacgggaacgaagggggctccccgtattcgcggcatacgcattgccattgctacgactacgaccgcaactcacaacgaaggaggttgtcatgttgaatctcaggcgaggcatcggcactcatgagccaagcgtgatctcgttgggccaagtgtgggtagacatcatgctggatgtggacgagataccggaacagggcggattcgctgtggccgaccatccgaagcccaccatcggaggcagctaccgagtgctgcaagcggccagccgcatgggtgtgccgaccgagcatgccggcattttgggcaacggcctgtgggcgcacttcattcgtcagtcgttccaagacaacggcatcacgcatatcggtcaggatcgacttgatgaggattccggcttccgtgtggtgctgacctccggttccccgaagaagaccttcatcgcctcctatggcgccgaagcgcacggtgacgccgatacgttcagcacactcgagccgcaagccaaggacgtggtacatatcagcggcaacacgctgatggaccacacagccaccggcgtggacggattcctgctgaaagccggcaccgatcccgccaagcgcgattacacgctggtcatcaaccccaccaatacgctgcgcctggtcaatgaccacatgctcgaagatctggtgcttgcgcgcccagtctggtcctgcaaccgtcaggaagccatgacgttggccgagcgcttgggcgctccgatcgacgacagcaaggtgaccatcggcggcggtcttgacgatttcatgcatcagttgtgcgatggtctgggcgccacgttgcgcgcgccattggtggtgcgcgtcggcgctcgcggcgcctggatacgcgagccgggcggcgagacgacacacattgaaggctaccccaccaaggccattcatactcgatcggccggcggctgccataccggtgtgatgtgtgcgatgttggcggagggccatagcttggccgaatcggtcaaaatcgcgaacgcagcggcttcaattgccattcagcacagcgtcaacggtgtgccgcagtgccctgattatgatgaggccattgcactgattggagaatagtgtttctctggctcccctcagtcacctgcggctgaggggagtttttcgtacgggccttgcccagcattattcacgtaccgttcagctgaatgggccctctaccgctttgagcactcctacgatagattgagttgaatactgccgaggagtgacatgaccaattccacgaatatccacgagcccaccggggccgagagccaatccaccgtgccgccaaacggcaagttgaccgcccgcgagaagaagtggatcgtctacgatgtcggcaactcggcattcgtgctgctctccactgcagtcatccccatctacgccaaatcactcatgccggcggacggcaacatcgtgtccgcctggggttatgcgcaaaccatcgcatcgctggtcatcgcactgcttatgccgctgctcggttccatcgccgacgtgcaaggcatgaaaatcaagttcttcctcggtttcttcggcaccggagtggttacctgctgcgcgatggccctaccgctgacctggctgccgttcctcatcgtctacattctggcgaccatcggccttaacggctcgctgacgttctatgattcgatgcttatcgacaccacctcgaacgagcgcatggacaaggtctcctcgcacggctacggctggggctacatcggctccaccgtgccgttcatcttctgcatcgcgctgatcttcggcggcccggcgctcttcggctggtccacggtagcctgcacgcgcgcctcgttcatcatcaccgccatctggtgggcggcattcaccatcccgctgatcaccagctaccgccaagtgcattaccgtgccacccgcgaccagctgggctcggccgtgcgcggcacgttcagcgaactggcgggcacattcggcaaaatcgtgaagaacaagccgttgtggatgttcatgatcgcgttcttcttctacatcgatgccgtgaacacggtgatttcgatgagtacctcctacggtgccgagcttggcatcgactccacccagctggtggtggcactgctcgtcacgcagttcgtggccttcccctgcgcgattctgtacggccgactgtccggccggttcggcagcaagacgatgatcacggccgcagtcgtggcatacatgtgcatcgtgctctttgccgcgttctttctgaagtcggccgcggagttctggattctggcgattctggtcggcatgttccagggcggcatccaagcgctctcccgctcgtactacggcaagatcattcccaaggatcacgccaacgagtattacggcttctacgatatcttcggcaagaccgcctcaatcatcggcactttcctggtggccaccaccacctccctgaccggcaacgcctcgctcggcgtgctctccatcgccgtcctgctcgtcgtggcgctggccttcctgctcctgcaaaaggacccgacgcgggagtgaaatcccggaaataacagaataaagtactgtgatagcccttcccttgacagggaggggttattttttgtgtgtcaatacgctggcttgaaaaacagcttgttcatctttccgtttttcgcaaaattcatattgacatttttgaatttatgaatataatgaggatgtaagttcaaaacagcgaatgtgaggtgagattcgtggcatctgcatacacagagaccataaaggtgttcaaagcattttgtgacgaaaaccgtttacagattttagaattgctccgcacaggggaaaaatgcgcctgcaaattgcttgatgatttgcatattacacaatcaacactttcccatcacatgaaaatattgtgtgatgccgacatcgtacaagggcgtaaagatgggaaatgggttcattactccatcaatcccgaaggcgcagagcgtgctaaaaaattgcttgagcaacaattatctttagttcctcatgatgagcaaaacggaagttgctgtaggtaaaataagccatctgtaaagggtggcttctcttttggacaacatttcgatagttttgaatttatcaatttgaaaggagacataccttatggagattttacgattaacgtggcttttcattcaagatcaggtgcttggaatgaagtggctgaacacggtaattggaaatggtttatccgtttttgggttagacacaacatcccgcttgggtgggagcatccagttttttctttacgatgtggttaaaattaccgtgctgctctgtgtcttgatttttgtaatctcatatattcagagctatttcccgcctgagcggagcaaacggatactgggacgttttcatggtatctgggcaaatatcatcgctgctctgctgggaacggtaacgccgttctgttcctgctcctctattccgctgtttattggttttaccagcgctggacttcctttaggcgtaactttttctttcctgatttcatctccgatggttgatctgggaagtttggtattgttgatgagcattttcggggcaaagattgcaatcgtctatgtggtagttggcttggtgattgcagtaatcggcggtacagtcattgaaaaaatgcacatggagaactacgtggaagatttcatccgtaatgcaaacagcgtggatgttgaatcagatgcactgacagtgagggatcggctgatcttcgcaaaggaacaggtaattgagactttcaagaaagtgttcccgtatattttggttggcgttggtatcggcgcaatcattcataactggattccggaaagctggattcagacggtattgggaagcaacaatccatttggtgttgtgttagccgtgttggtgggtgttccaatgtatgcggatattttcggcacgatttccgttgcggaagccctgcttgcaaaaggagcgcagcttggtacaatcctcagctttatgatggccgtcactacgcttagcctgccgtccattattatgctgaaaaaagcggtaaaagcaaaactgttaggactgttcatcgtaatctgcacgcttggaattgtcattgtgggttatctgtttaacgtatttcagcatctgttgatttaacaaggataaggtgtaaccatacaaaatttgaaaggagattctattatgggactgttcggatttggcaaaagaaaagaggaaggaggaaagactgttgcttgtgcttgcaatggagcttgtgaaacgtatgaggccgagactgtaaacggtagctgctgcgatgaggcaagcaacagtatttgctgtattaaggttttaggcagcggatgtaagaattgccatgccttgctggagaacacaaaagcagcactgaacaatatggggttgtctattcaaccggagtatatcactgatatggagaaaattatggcctacggtgtaatgtctatgcctgcgttggtggtcaatgaaaaagtggtgtctatgggaaaggtgctgaaagctgctgatgtggaaaaactgatccataagttggggtactaaaagtggagaaaaagagagttgcttttatatgcgtccacaattcctgccggagccagatagcagaggcattagggaagcattttgcttccgatgtgtttgaaagctattctgctggaagcgaaaccaagccccagatcaatcaggatgctgtccgcttgatgaaagagctgtatgggattgatatggaacagtcccaatacagtaaaacctttgacagcatcccggaaccggatattgcgatttcgatgggctgtgatgtgggttgtccctatattggcagagcttttgacgataactggggactaaatgacccgacaggctgcccggatgaagcgttccgggaaataatcagtcaaattgaggggcacattatacggttaaaaatacgaattgaaggaggtgtttatggttgaaaaaagaagctgatccggggatcaatttttttcaacggtatctgacaatatgggtattcctgtgtatggtggtaggcgtattgctggggcattttgccccagtagtccctgcattactggctcggctggaatatgcccgtgtctctatcccgatggctattctgatttgggtaatgatatatcccatgatgctgaaagtggacttcaacagtgtacgaaatgtaggaaaaaatccgaaggggttgtttgtgacatggattgtcaactggcttataaaaccttttacaatgtatggcattgccagcttgtttttcttcgtgattttcaaggcatttattacgcctgaccttgcggtagaatacctcgccggagcagtgcttttgggggctgcgccttgtacggcgatggtgtttgtatggagtacgttgacaaaaggaaatccagcttatacggtggtgcaggtggcgaccaatgacctcatcattctgattgcttttgtgcctatcgtaaaatttttgttgggcgtttccaatgttagtgttccctttgatacgctgattttaagtgtaatactgtttgtggttattccactggcaggcggtattttgacccgtgtatttgtaacccgcagtaagggaacagagtattttgaaaatgtgtttattcacaaatttgattccattactacgattggtctgctgcttacgctggtgctgattttcatggggcaaagcgaagtcattttagaaaacccgctgcacatcatactgatcgcagtgccgttgattttacagacatttttgattttctttattgcctatggagcctgcaagttgttaaagttaccgcacgatatttccgcccctgcgggtatgattggtgcgtctaatttctttgagttatcagttgcggttgctgtcgctctgttcggtactaccagcccggcggcacttgcaacaacggtcggcgtactgacggaggtgccagttatgctgacgctggtgaaaattgcaaacaaaacaaagcaatctttcagataactcaatgctacccaatttcgatgactttgcgtatttcgctcgaatggtttttgaccgttcgggcgatttttttattttttgaattcatcacttgacattgtggcaaagatttgccagtcctcggcaactctgcgccgcgggcgatatctcgcaacccctgcaacgggccctaataacgatggaccatcaccgcttgatcacttgcgctcgcgataatccttgaccagctgaatggcgagggccgcaacgccgcacagcacaccgccaatcggccacggcagccagaacatcgccccatccgcggcgcttgacccaacggccgaccaatcgccgcgcaatgccgcagggttcaaaaacagcaggcacaggccgatcaccgtggctatcaacatgatgatgccacacaccgcaccggtcagtttgacgtagacatcctgctcacccgcatgctccttgcggtcgtcctcggccgctttgttgtatgcgttgatattgagcagactgtatctcatgccgcagtagacaaacccgaaaacaccggacgcacagagcagcagaaaaatcgcgttgggccagccatcggagacgccgagcatgtcatcggcatacaccgtcaccgcaatgccaatcagaatagccgagatgccaccgacgatgccgattaccagcagccgcaattctcggctgcggtcctccccggtgtagaaatcttctacgtatgggtgacgccgtttgaagtcaatacgcgacagacctcctggaatcagcatcgccagccccgcaatcacacccacgcagacgcacagaaacgtcagaaaatcgttgagcggcgtcgctccgagaatggaattgctggaatcgaacaggttgccgatgccaaccccggcgataatcgccgcgacaccgccggcaatcagcagcgcgaatcggcggcgatgttcatcatagccagtgatatcctgcgcaagctccgcgataggagcgattatgcccgccgttttggaagaagcggctaaaggcgatgccgcctcagccgaggagtcaacattcgacgaaccggccgcagaagccgatgcggcaggccgactcacatcgccaagtaccagatcatcaagcgtgcagccgaacaggtcgcagatcataagcagcttgtccatctcgggataggccttttcggattcccatttcgaaatggcctgacgcgagacgccaagcaacatggccaatcgttcctgggtcaggttgcgttgcgcacgtaggtactgcaggttagcgcgaaaactcattggaatgtcccttcatacgtaatctttatcatgtcatgttcggccgatgggctcactatggcatgccgtccatgtcacccgccaccatctttgggttgcaatcgccggttattcgagcgcaaccacaagttgcatcggcggaattccgccattccgttgacctgagcagctttaacatcgcactccacgagaccgaagcttttccagccatgcgagggcagcttgtctcacctgccaccacgaatccgcttcgacccacgtacacatctgtgtacagcagcgctcgcaatcggttacctacgacccatatgatttgctgagcgaccgcaaaacacgcaatagccgagacaacaccgtcagcgttaaagcttaaggcgactacttgcccaatagtccggaaatctggccgatgatgccagcgggcagtcctgcttgttcggcaatggacccgaggtccagattggcaccctgctcctgaattgcgccagcgacctgactgatccggtcggcggagatgttttcctccgccagcgcctgcagctcgtcaagtcggtcggcgttcaaatggtcgccaacgacctgttggttttcacccaactgatcggcattgaaatgctcaccgattaccgccggcaaatcaccaatcgaaccgagattgaaatccccgccaagcacattgcctagattgtctgcggcaaaatttttcaggctatcgaacagtcccacatgtgccgctggtactgcttgttcagcaactgctgcagagcatcgcacagaccctgcatcaatcgccgctcttcggcagacaagtcccgcgtcttacgcatcacagcccacgccatcagccgccgaaaaactggcattggtatcagctgaagccgccgcttccacgtgcgttgattctcaaccatgcccatcaattcgtcgcgagcctcttgacccatatcccgagccagcgaacacgtattggacagcaccagtccctcgatgcgttcgggatggaacttcgccacgatttgcgcgatcacgccacccagcgactgcccaaccagccacacatgctcatccaacccgtccagcaggctagcgacggcccgcgcaagctcggcgttcgtggtgaactgctcctgataatcaaacgtaatgaccgaataatgctcagcgaatcgctcgaaatgcagatagaacaggtcgggcagcccgatgccgcctggcaacagcacaaccgtagcgcgggcgacgggattgcgatagtaccgatatgagaattccgcgccgcccggcaattgcatggtttgttgcgagtatcgcgcgcagaacgaggcaagattactcattgccgatatccctttcgattgggggcctcacacaaaatcgcgtctctcactaattgcgtgagccaacatgactccgattgcgggagcgcaacaccggtagcgccactaatgcagacataggcgtccggcaaatgggccaaatgggcaaatgagcacaacaaaaaaactcagcgtacgttcttccagacatcgccgaaaatagtccgggaaatcatacgttgagggaccgaatgcccgaggggaagaaaaacgctcgcagcatatagctagcgagcgcgaatctcaggtgggcgatgtaggaatcgaacctacgaccccttcggtgtgaacgaagtgcgctagccgctgcgccaatcgcccgaggcagtgatgaaaaaaccggcagtcacctgccggcaatccatcaagtgggcgatacaagattcgaacttgtgaccccttccgtgtcagggaagtgcgctaccactgcgccaaccgcccgggtcattctccagccgaatcaatcgcgattaattggcctttcgagagcggacaacgggactcgaacccgcggtctcaaccttggcaaggttgcgctttaccaactaagctatgtccgcattcgtcacccttacaagcaacagatgttaaagatacgcgctccgttggagaaatgcacctgccctgcgtgtcccgcgggttttcgggctttgcggccaatcaccgagtccgcccatgaacgtagttcgccgtagccgcatacagcagccatgcggcgggcatggccagcatggacaacggatagaaccattgaatcggcgcattgccgtacagcagtccgccaacaatcggccccaatgacatgcccaaatcgatgccggcgtaatacgtgctgttggcgatgccgctgcatgcaaacaagtggccaaatgcgacgttggccacgatttactgagtaatgagcgtgttccacgcccgcagccaccgattcttcgcttaaggcgaagtggttgtcagcgcggcaactgcacaatgagagcgttaccaacaaccaatgcaaacccgccggcagccgtagccgccgcccgcaaggccgtggttgaggtcgacggcgtgtggatcttctcccccgaatacaactacagctacccgggcgtgctcaagaacctgctcgactggctgtcccgcccgctggagccattcccggccgagtccacttccgtgatggtcggcaagaaggtcgccctgtccgctgccgccagtcagtccgccggcgctggcacgctcgccaagctcaacgaggtgctgggctttggcaagaccgaactgctgcccaccgacaagcaggtcggagtggctctggctcccgaggcttgggggcaccggcaagctcaccctgtccgatgaagacgaggcgcgtctggctgccgaggctgacgccttcctcgcgctcgttgcagagtagttcatactcgcaatagccgagcccaataatctttcagaacgtaaaaatccctccggttcctctgaccggagggatttcttatacgtcatcgattacgcatagattcaatggcggcaatgtcaccgccgccaagggttagctcatgcgataatcaataccctccgagacagtgacgcccaatcacgacgtgaaattgcgagtttttctttagcgagaggcatctcagcctgatcaagcgactggacacatgcccatcttcgttcaaagaggtacatttgagactttgcagaaagctatctgccttcaaaggggtattgaaactctgatatcgcaagtatgagcgttgatattccaacgaagatactcgcggtctcgcagtctaggtactcctttgaaagcagatgacattctgcaacttctttggaaagctgatttagaggtctgaaaatatctatctccatttcgagaggcggatgcgaaccgttccgaagttctaattccatttcgggggctgatttgaaccgtcccgaaggtctatctccgtttcaaggggctgatttgaaccgtcccgaaggtctatctccgtttcaaggggctgatcatcctatgcaccacgagtatcaatggcataacgtcaacgccattccgccgtttttgcgtcttgtctacttgggcaacaaccccttgaaacggaagtaggcttccggcgaatgtcgaatccgccccttgaagtgcgagaagcccctccttcacggaggggcttctcgcactttgttaatttttttctcactgaggctgtgtcagtgagaaaaatttgcgaggcagctcccctcaaccgaggggagccaggggatatcaggcctcgtagtagccgtcggcaccgagacgggcgtccgggttgaggagcatggccttttcgacctcgtggtggtcgtaaccgcggtgatcctcgtggaagcgacggttgtcaatcggctcgtagagcgcggcgcgacccatcatgccttcctcgaggtgacgctggcctgccaccaagcgcgcgttggcacgctcacgccaggcttccagcgcggcctcgccatcggccttggccacggcggcctcgaaggcaccggggtgaaccagcgccacgaagccggagacgtgtccgaagccgagcgaggtggccagaccggccttgaccgggcgaccagcggtctcacgaccgaactcgtcctcgccgccgccgatgcgcaggggctttctgacccagaccatgtggtcgtcgcgctggagtttcggatccacgcagtcgagcgacacgttcgccggaatcacgccggacttgaacagctgcgtcaggccgttgacctggaagatgcaggcaccgcccttggcgtggccggtgagcgtcttctgggagatcacgaacagcgggttgccgtcggtgcggccgatggcgtgggccagcgtgttgtgcagctcggactcgttcgggtcgttggcgttggtggacgtgtcgtgcttggagaccacggcgatgtcatcggccgaaacaccgagcttggccagatcgcgcacgagcttggagtccttgcctcccatgccggcagccagggcgccgagacccggggccgggatcgaggtgtgggcaccatccgcgtaggagtggatgaagccgaccacggccgcaaccggcaggccgagcttttcggcgatgtcaccgcgggtcacaaggatcgtgccgccaccctgggattccaggaagccgccacggcgacgatcgttcgcgcggctgaagaagcgcgcgtcgatgcccttgccgtacatttcctccgagttggcggtggcgttcatgttgccgaagccaatcacggattccacgccgatgtcgtcgattgcaccggtgaccacgaagtcagccttgccgagggcgatcttgtcgacgccctcttcaagggagacggctgcggtggcgcaggcggagacgggctggatcatgttgccgtaaccgccgatgtaggactgcatcacgtgagccgcgaccacgttcggtagggcttcctgcaggatgtcggtcgggatctcgtggttgaggaagcggtcgaggtacagcttgcgcatcgacatcatgccgccgaagccggtgccctgggtcgaagccaccagcgaggggtggatggactcgaggatttcggccggggtgaagccggcgcccaggtaggcgtccacggtggtgacgatgttccacagggcgatcttgtcgacgtcgccgaccatcgaggcggggatgccccatcgggtcgggtcgaagcccttcgggaactggccgccgaccgtgcgggtcatggtggcgcggcgcggcacgcggatcatcgagccggcgtggcgggtcacgttccattcgccggattcctcatccggggcgatagtggtgtgagcctcgtccaacttgacgtattcggcggcgacttcgcgggtgggcacggagaaggtgacgtcgtggtcgaggaagacctcggcttcttcttcatcggcgccgtccttgtagtcgtcgcccatgccttcctcgaacgggcggatgccggagcgggccacgacctcgtcgtggtagcgctcggcgatgtcctcttcgggcaccaggttgccgtcggtgtcgtaccagccgggcttcgggctgtcggcccaagtcagcaggcccatgttccatgcaagttcgagcactgcgccggcagacagatcaacggtgccgtccgggtggatgccgagttcggcctgggtgcgcgtacgaccggaaccccacgggcccagctcaccgacggagacgatgacgatctcgtcctccgggcgggcggtgacgttctgccaatcggcaaggtcgaccgaggcctgcttggtgacaattggggtgggcagagccttgagagtggagcctgcggcgccgccctccggcttctctccctcaatcgcaaccttctcagaggaagcttccttctccgcatcggccatggcctccgcgcgcaacgccttgatgtcgatgggctcggagccgaggccaccggtcagatccacgtcgagcggagccttgagggcctgctcgcgcgattcggtggtgcacaggtcgagcagtttggccgcgatctgcgcggtggagtaggtgtgaatgccgtggcgctcgacgacggcgaccagcgggtcgttgccgcccataaggccggtgccacgcacccagccaatcttcgggtgagcgaaagtgacgcggctcgaccacaccttttcggcgcgggcgcggttgacgatggcgtcgaaggcgctcttgacctcgccgtaggcaccgtcgccgccgaacacgccgcggttcggggaaccgggcagcaccacatgcagcttgtgctgcacgttggtgtcggcaccgatgtggctgaagccggcgatggcgcgttccacgccccacagcatcagtcgggcctgcgactcgaacaggtcgccggagtcggcaagcgtgccgtgaaccggcggtgcggcgaacgggaagaacagggtcggctcccacgcgggcttcaagatcgtggtggtggcaccagaggtcttcttctgctcgtggcccacccagtcgaccagcgcgtcaacgtcgcgatagctggagaggttggccggaaccagccacagcttggcgttgccggtggcgtgctcgcggtacgcctgcttcgcccaagccttgatggacggcttgaagctgtgcgaggtggccaccacggtggcgccgcccgcgagcaggccttcgaccacctgagcggcgatggagttcgggctcacaccggtgacaatggcgatgtcgttcgcgtagcgggaggcgttcttgtcggaagtaacggattcgagggcttcggaagcggccttctggaaggcggccttgagctcatcgttgttcgacttgtcggcgaaccactgggcttcggcggcgatggtcttgccaaggccgatgaagctgccgttcagagcggcggggtcgttgtcgtagtaggcgcgggcgaggtcttcgcgggcggaggcccaacggtcatcgaagaggatggccttgttggcatcaaagcgtggagcgacctgcttgggccagtcggagccaagctcggcttcgaccgcggccaccacggcggcattctcgtactcggattcctccggagccggagcggccacgccgagctcgttcagcacgaagcgggcggtggcggcaagcacgccgttggaaccggtgaccttctcggcgaaggcgtcgagtgcggcggaatcgaccacggcaccgccagcggcgccaccggcggacggcagagccacggcaacgcccttaagctgggcgaccacttcaacagcggcgtcgatcagcttgtcggcttccggcttgttctgcacggcagcggtcggcagcttggccaggtcaccgccacgggagctggagccctcgcgggtatcgagcagcagtgcggcaagtacgctggccacccagccttcgccgagctgccacacgttggccacacggtcgcggatgtactgctgcttgacgccggcggcaccgaacagcgagcgcagacgatcgcgcagtgcctcggagagcacggcaccgaacggcttgtagttcggggcggccttgttgacgatttgggcgagcttgtcgagcgtcgcctcggcggcaccgtccacgctggccacgcccagctcggagctgatgtccatgagcagctggttacggcgagaggaaacgccgttggtcaaggtatcggtggtgtcgttgctgccgatctggtcaagacgaaccttggcggcgtatgccatgaggacgccgatgccatcggaggctttgaagggcaggtcggcgacggcggcaccggacggggcgccggcgggagcggcagaaaccggagcggccggtgcgggagcagcggcagcagccggcgctgcgtcagcggctgcgctcgagccaagcttggcgacggcggaaccgccggcgggagcggtttcgaccggagccgcggtctcttccggctcgtcgtcgggaaccagcgaatcggtgtcggtcatgtagacgcggccctcatcgcggccgacgttgtagaccaccgtgtcgttgccggcgaactcgggcagacgcagggtcttggcaccgaggttggcgagcgtcggggcgttgccgaggccgacttcgacgtactcttcgacgccgaggccgccctgttcacgcttgccgaacagcagtgcctgggtttcgatccaacgcaccggggaggcgaattgccaggagagcaactcagtgagcagcagtcggccgagcttctggtcatcggcggcgtaggaatcccacacggccgggtcgtccagtgcggccttgatacgctcggaaggcacgacttcgaggatcttggcggcgaattcctttgtcatctcgaacggcgaagccacgaggttcggaatgtagcggtccaccagacggccacggtagtcgatgtaagcgggcaacagcgcgtcgagcttgtcgcggaattccggcacgcccttgcgcagcaaggtggagtggaacggcacatcaatgccgggcaccagcatgaacgcgggcttgccgccgaatgcggccacgcgacgggcggaatcggccttcagcgccttgagaccggcgatcgtgccagcgatggcgtactgctggccggcgaggttgtagttcacgatctccaggaactcgccagagaccttggccacggattccacgtattccttgacgtgagcgtcgtccacaccgaactggttcgggcgcagggcacccatgcggtagttggagcggccctgggcgtcacgctcgatgaggtggtgcatggtggaaccacggtggaacacgagctccagtacggtttccagcggaatcacgtcggcgaatgcggacagcgcgttgtactcgccgagcgagtggccggcgaagtaggcgggccagatgtcggcgccggcttcgcgtaggcgcgcggtctgggcaaaagcaaccgtcgcgagcgccacctgcgtgaactgcgtcaggttgagcaggccttcggggtgacggtaggtcacgccgttggcggtgagctccttcgggttatcgcgcacaagacccaggatcgagaagccgagcttggcgcgggtgagcttgtcggcgcgctcccacacgtcgcgggcggcggcggacttggcgcgctcgtccagaaccatgccctgcttctgaatgccctggccggggtagacgaaggcggcgcgaggcgcgcggaccagtgcggtgccgcgggagactagctggccgtcgatacggcaggtgacttcgagggtcatgccgccgtggcgcaccttgccgacgcgctccacggagatctcgacggtgtcgtcgagctggaccatgccgtacatgttgtaggtccagccggcgatctcgtagtgggcgcccttctcgtccagtgcctgcacggcgtgctgggcggtggcggacagccacatgccgtgcacaagcggggcggccagaccggagatgcgggcgccgcgcgtggaggtgtggatcgggttgaagtcgccggaagtgcgggcaaaggcggtcatgtcgtgcggagcgacgaccttcacacggcgcagcaagcggcgcggcgtcggagcgacttccgcgtgctcggcatcgccgaattcaggagcgtcagccggcagagcgtcagagtagacgcggccacgaatggcgaaacgctcggtttcgcgggcgagcagcgtgccatcggcagcggtatgagtcacgtgaatcgtgaccacacggccggaagcggactcgaagtagtcctcagcccaagacttcagcgtgatggtttcgccagtgtgcttgagcaggtcctcctcgttcacctcaagttcgatgaggtggtcgaggtggacggcgttgagcaggccttcgataaccgggtagcccttgacgtacacggaaccgagcgccgtgtagatcgccggccaggccgggccgaccagtgcgtcgggagcgatgcggctgggctgcaatgtggcgggcagagcggcaccagtagctgcctcatggtcaaagccgaggttggcggacaaggtgtaggtggcagtggcggtaccgaacggcctgttctgagcggtctctccctcagtcacggcattcgccgtgacagctccctcgtcagagggaacagacagggtgggcatcgcggtgagcttgtcgccggtgatggcggtattgccaatgccggcggtggcggcgagcattgcgtacacgtccggaatcagacgctcgcgatccacgaccggcactcggccaggctcggttccttccacgatgagcggaatgacgatgtcacgaacggcgtgcttggaggtgccgccgtccggatcgttgtcccagtaggtgtcgaggtggatatccagatcgtacttgccggctgcggcgtcaaatgcgcgaatctcgtagtactggtcgcccagagcggtgccgtaggcgggattgtcggcgatgtggcccacccaggagatgttcggagacttgcggatgaagtcctcggcagaaacggcctcgccgagagcagcgaagtcattgctttcagaggcattctgctcggccttcacgcgctcgatagcggcgttctcgaaacgaccaaggatgtctgcgatcggctcgtccacggtggtgatgccggccacggaaatcgggccagggatggcgcgcacggaatcggcggaataacgctgatcctcggactgccagagctggtcctgtccccaccaacgcagcagatcgttgtcgatgaccggcacgaacggcatgggcttggggtattcgcgcacgagcaccgggaaccaggccacgtcggccgggaccaccttgagttcgtcggtctgcgggtaggccagagcgagcttttccagcgcgggggccggatcggcgagaatgccgtcgcgggtcagcaggccggcggcagcggcctcatcggcagaaacgccgtcggcggcgaacagcttggaggtgaactcgccggagtcggtgtcgttcgcacgggcttcgatgcgctgcagcaggtgctggaatcggtcggcgtaagtcgggtcggcccacgggaaggcgagttcggcgaagcgctgtgcccactcgaggtaggtcatggaggccagatcgccgaagtagggcttggcggtcttgttcagggcctcgatgatttccttgcggcgggagtcgagctcctcggggtgcttcatcacgcgcacaagcaggcggccgcattcggcggaatcgttctcaagctcgtagatgtcggcatgcaggtggctcaggcctgaggacatgccaccgaccgacttgccggaaggcacccagtgggcggcctgcggggcgaacacatcatcggacttggcgtcggccggaatgccgggcgtcttgacgagcatctgcttgacttcggggctggtgtgggcttccttggcggtcatcgcagcggtgccgataagcacgccgtcgaccggcatgtccggcagaccgtaggcgtgggcccactggccggagatgtagtcggccgcgcgttcgggggtgccgatgccgccgccggcgaccagcacgaggttgtcgcaggcgcgcacttcggcgtaggtggcggcgagcaggtcatccagcgcttcccagctgtggtggccgccggcctcgccgccttcgacctgaatcatgatggtggtgggggccacggccttggcgatgcgcacgacctgacgaatctggtcgacggtgccgggcttaaagctcacgtacggcagaccatcggcctgcaggttcttgatgagttccacggcctcgtccagctcggggatgccggcggaaacgaccacgccgtcaatcggagcgccggaagcacgcttcttgggcacgatgcgggaggagccgaactgcaggttccacaggtagcggtccatgaacatcgcgttgaattcaaccgtgcggccttcctcaagctcgtcttcgagggcggcgatgtggcggtcgaacacttcggcggtcacctggccgccgccggcaagctcggcccagtagccggcgttggcggctgcggccacgatttccggctccacggtggtgggggtcatgccgggcagcagcaccggcggcttgccggtgagcttggagaacttggtgaccagcttggcgccggccggggtctcgatgacgcgcggcgcgagtgccttccagttctgggtgcgctcgggctcgctttccaaggtggagagagcggagcgttcggacagcgtggtggcttcgaccacgccgatgccggtgccctgcaccacgttgccgatcagcttgccaagcgtgttgccagggccgaggtccacaatccacagcttggccgggtcggcggcgttgaacagcgccttgacgcgggcattccagtccacatggttgagcagcacttcctcagcgagtgcgcgggtgcgatcctggtcaaagccgcaggcgccagcccaagacacggtctgctcaacagcttcggccatgagcggagaatggaagggcagggtgacttcgaggtattcgagagtggggttgaacacagtgccgccgtggagcttctgttcacgcagcttggcctggtgcttgtgctcgcgctcggtttcgagggcgagtgctgccaggtcttccgggtggccggaaagcacgtggtggttgtcggagttggtgacggcgatggagatcgggcctcgggcgttgttcacgcgcttgaccagagcctcaacctgttcgcgggtggcgcccttgacggagagcatcgggctggcctcgccgtacttggggttcaggcccagttcgcgcacgcggcgagtgccggctgcaccgatcagggcggcgacggccagaatctcgtcgagggtcttgccggcggcttcgatggagccggcggcctcgatggcacgggtcatgtgcacggcgagcacgccctgggagtggccgagcacggcaaccggcttggcggcggccacactgtagccaaggtgttccaagtcgagcagggcgccgagctgggtcagggccacgccttccacggatgcggtggcatcggctgcagcgctgaggcgggccgggttcggggtgaagccgaacaggtcgaccggacgaccggtggtggccagcaggtcagcggcggccggggcgagcagtcggttggctgcggcgacgtggccacgcagagcctcgtcaagactgggatcggtggtctggtctgccaaggcgaccggccacggggtggactggccggcgaaagcgagcgcatgaggctcggtggtcaggcggttgaggaagaaggtggacattactttccttacttgtgttttggttgacgtcttcaaaaatcaaagtggctggttgccgtggtgtttggtggtgcgcttgatgcggcgcttggtagcaagcgtggccagcgattcgacgatcacttcacgggtttgttcggggtcgatcatgccgtcgatctgcccgatttccagcgagaggttcgcgttgacggtgctggtctcgtactccttgatgtacttggcccgcagcgcatcgacgtcctgtccggaggctttggccttggccaggtcatggcggtggatgatgttcaccgcgccggccgcaccgagcaccgcgatctgggaggaaggccacgcgaagttcaggtccgcgccgatggctttggatcccatcacgatgtacgcgccgccgaacgccttgcgcagcaccacggtcaccatcggcacttgcgcgttggcgtaggcgtagatcaccttggcgccgcggcggatgatgccggcgtgctcctggtcggagccgggcttgtagccgggcacgtccacgagggtgaccacgggcaggttgaacgcgtcgcacagtcgcacgaatcgggcgaccttctcggacgagtcgacgtccaggatgccggcgagcacgttcggctggttcgccacgatgccgaccggcttgccgtcgatgcaggcgaagccgacgagcgcggaggcgccgaacagttcctgcacctgcacgaattcgccgtaatcgacgatgcaacggatcacttcgagcatgtcgtacggctggcgttcgttggcgggcacgatggtggcgagtcgcttggcggtttcgcgttcggcgcgggtggcggcgtaggcgtagaccggcggcttgctttcgctgttggacggcaagtaggcgagcacggtgcgcgcgtagtcgatggcatccgattcgtcctcgccgaggtagtgggccacgccggacacccggttatgcacttcgccgccgccgaggtcggccatggagatggtctcgccggtcgaggccttgaccacgtccggtccggtgacgaacatgttcgagttctcgcgggtcatgatgatgaggtccgtcagtgccgggcaatagacggcgccaccggcgcaggggccgaggatcaggctcagctggggcacgaagccgctggcctcgcaggtcttgcggaagatgcggccgtactgggtcagggcggccacgccttcctggatgcgggcgccaccggagtccacgatggctacgatcggcactttgaggtcgatggccatgtccatcagtcggcagatcttctcgccttcggcggtgccgagggtaccgcccttgacggagaagtcctgggcgtagacggcggctttgcggccgtagacctggccgaagccggtgatgacggccgcaccggcgttgccgccggcgatgttgccgccctggaagcgaccgatctcctcaaacgtgccagtgtcgaagagcaggtcaaggcgttcgcgcgcggttttcttgcctttggcgtgctgtttgtcgcgggcgcgctcttcggcggcgcgagccagttcggcggccttgaccacggcggtgcgcagcggctggtgagccggaggctgggaggcgttggtcgccgaggtagcagtcacggcattgacggccggcgaatccataatgtcagtcattgccgccctccttcttggagtcctcggccttggccacatccagagtgaccaacgtgtcgccggcttccacaccatcggctggaccgacgaagatcttcttcacttcgcctgcggccggcgcgtacacgtagttctccatcttcatggattcgagcaccaccagcaagtcgcccttggccacctgctgaccttcggacacgttgatgcgcgtgaccacggcctgcatcggggacgcgatgacgccggatttggcgccatcgttcgccttggcggcgccggaggccacattgtgcaggcctgcgccgcgcaacggctgagtgggtcgcttggcaccgcgggcgcgggccgatccggtgatgttctccacgatgtcgagcggcacggtgagcttgacgcggcggttgttcatctcgatgacaaaggtttcggacgtggacttgtcggacgcggcaggagctgcggcaccagccagcgatgccggctgacccgagctggcggaagccggtgtgcggttcaggtacgtgcgttccagccacttggtggacacggagaacgggtgaccgttctcggcggtgaagtcgtcgttgcggaagatctccttgaacagcggaatcggcgtgggcacaccttcgatcaccagctcgtccagcacacggcgcacacgggccacggcgtcaaggcggttctgggcggtgacgatgaccttgcccatcatcgagtcgaacttcggggagatggtgtcaccctgctccacaccggtgtcgatgcgcacaccgggtccggccggccactgaatcttctcgagggtgccggaaccaggggtcaggttggtgaccgggtcttcgctggtgatacgcagttcgaagctgtggccgcgcggctcaggggcacgggtgagttcaccgcccgctgcaatgttgagctgttcgcgcaccaggtcaaggccgctgacttcttcggacacggtgtgttccacctgcagacgcgggttgacttccaggaaatacaccttgccattcggggtcaccatgaattcgcaggtgcccaagcccacatagccgaccgtggtaaacaggcggcgggagtactcctccaaagtgctgatgatttcctcgggcaggaaaggcgcgggggcttcttccacaagcttttggttgcggcgctgcagcgagcagtcacgggtggagtacacggtgaagttgccgtgcgagtcgcgtccggactgggtctcgacgtggcgtgccttgtccacgaacttctcgatgaagtattccttcagatcgccgccttgcagcgcgtcgtggttcatgtagaagcggcgcagttcctcgtcgtcatgcaccacggtgatgccgtggccgccaccgccatcggtgcgcttcatcatgatcgggtagccgtgggtgtgtgcgaagtcgagcagggtacgcacatcggtcaccggttcggacagacctggcacgggcggtaccttggcacgcagggccacgcggcgggcggtgatcttatcgccgagatccacgagcgcggtgtggtgcgggcccacccaaatggcaccggcatcctcgaccttttgcgcaaagctcggcacttcagacaggaatccatagccggggtgcacggcgtccgcaccggttttgtgcaggatgtcgatcagcagatcctcgttgaggtaggtgtccttgtaggtgtcgccggaaagcaggtatgcttcgtcggccatgtccacatagcggctgttgcgatcctgttcggagtagacagccacggtggagatacccatctccttggccgtacgcactacgcgaagcgcaatctcgcctcggttcgcgatcagcagttttttgacaatatgagccatagcgtcaaattgtgcccttgatatgaggtatggggcaagctgagttcgcacaaaacatatcatcggcttttgtaggccatgaacaaacgagtgcgtaagtttcaggagcgtaaccgcatgcccacgcaccccttaagacttggaacatcagggtttttggcgctattgaccaagcacgccggaagttgacgccattcatgtattcgtcaacttgcaacaaaccagaatcggaaaatttgtgggttatcacgaaatcgcacgaaaccgaacactcctacgatggcaaccgtaagttcgggggaaggctcaacgtacaggcggatacagccaatggatcggcactcgattcaggcatcaaccgcctcgttccgcagtcgatggtacgcatgccaagccgtccgcaatatggacggctaatgcgcatcaaggccacataaggccacggcactcccactccatcgcataccgcctgccagtaacggcgatagcacacaacataggagttattcatcatgcagacttcacacaccacctcatccactgcggccaccgcatcactcggccgccgcatcgtcgccgcttcgtggaagccggcgctgttcgccgtactgatgtggctgtccgcagccgcaggcgcaatcccgattccgggcacaccggtgccgatcaccctgcagactttcgcggtgatgcttgctggtctgatgctgccgtggcgtcaggcgggttccgccgtcgccgcttacctagcagctggtgcagtcggtctcccggtgttcgcgggcggcacttccaccatggctctggtcggcccgagcgccggcttcctcttcggattcctgcctggcgtgattgttatcgcgctgctgcgcggtaaggccaacacctcgtccgcttccgccgccgctctcaccgtaggccgctacctgctggccgctctggttggcggcgtcgtggtggtgtacgcctttggcttcgtcattcagtccgcgctgaccggcgtaccgatcgccgccgtggccttggcttccatgggcttcgtcgccggcgacgccatcaaggcagtcgtcgcctccttggccgcagccggtctgtccaagctcggtcgctgacctacagcactcctacatcggcggtgcggaccgtatggtccgtgccgtcttctgttcttaagatcaatgaggcatcttcattaagcccgattgcctcaccaatcagcgtggtgccatcggtgaagtgcgcctcgatctgacggccgcgcgcccaacataccgccttcatctcttcacgcaatgcctcggcctgcccgtgcggatccgcaatgaacgctgccaggcgctctcggaagccctcaacctcacgttcggccaccgcgtcacgcatctcgttgaacgacggcaaccccgaaacgtgcagctgcagcgaagtcgattgcggcgtcggcaaacggctcgcgcccaacgccagattcaggccgaccccgaagacgacgacaacatcatcatcagcttccccgtccggcaacaacaccagttcagagagcagtccgccgagcttgagcccgtggcagaacacgtcgtttggccatttgagctccaaaaaacaatcctgcttattcggagcggcgccatattccttaatcatgccgttcagcgcatcgagcgtgaccagacccgcaatcatctgcagccagccgttcaccgattcgtcggtggcgatcgcgcgaggaatgcgcacggcataggacatcgttgagcaacggccaggctgactgatccaggtatgaccattacgccctcgtccggcgctctgccaatcggtggcgactacaccgacggcaagcgtgccgcccttgcgctcaggcagcgtcaacgacccgtcacctatcatgcgcgcagccaacgcgttggtcgaatcagtctcgcccacggcgactacttgatctgcaacggctttggttctcggtagctgcggcgttgcagcttgcaaagcaatcatcatgggaactacgttaccccgatttgcgcgaccagattcccgatgtctcgcgaaaaagcgcacagaaccgcccattttcggccaatacctcggtgtgaacgctcacacgtgagcaaagtcacaccatgcagatggcccgcatacgattgcagtcatagcggccttgcctgcgtctgcaatccaccggtgagacggcgaccatcacacatctgcatccgttgacctgtgcggctaccatagactgtcatgacgtcgccagcctcttcactgcctgttgccgcagcccacccgcgccttgcccgtgtgggcgctgctgcacggtggacgctggccgcactggcttgcctgtggctggcactatgcacagcggtgggaccgttgtactgggattttgaaaacggcaccatcgccaattggaattggaccaataccgcattctttgtgctgtcgtttgccatctaccttgggctcatcgtgattatggtgcgctttgcggcaggacagcgcgtgctgccacgggcgatcagcgggagactcagccgggccgggcagcagcacagcaatcaggctctcgaaccatcgcagtcccagtccgtcgtcgccgactccaatgtctccaagcgtcacgccaccgttgcgtcccgcttcgccaccttgggccgttggatcacccgcggcacgaatcggttctggaagctcgcactcgtgttctttatcggttggctgtgggtgccgaccaccctgctggccgcattcggcgcggatatccgctcgcaaatccgcgaattcagctgggcctggaaccaatggaccggcctgcaacagccgtatatcggcttcttctccttcgtgccaatggacatctaccccaccgcgcactatatgtggccgcctgaccccacttatctgaccgaccagcataacgtagtgctcaccgtgttctacggtgcggtggccgcattctcgcgatatctgaccggctcgaacgatgcaggcatcgtggcgcttgccgctggacagatgctgctcgccgtattctgctgcgccgcaaccgccaaccgattcctcaatcgaccgtggatgggcgtggctcagtcaaccaaggacaagaacggctccagcaccggcaacgtatcctcgactaccagcgcgcgcatcgcacaggatgccgcaccccagcttgccggggggcatgcccgattcctgattcttgtgttcttcctgtgctgcccgctggccgtgttcgccacgatctccatcaccaaatcgccgctgttcgccttctcgttcgtctggtggttcggcatctggtatgagctcacccagacatggaagcccgcgggaaagcgcaaaggtctgactgctaccgtacccatccgcttaccacgtcatagttttgttgcgttcgttctttccactgcagtgatgctgatttccgcgaagtacgcctggtacatcatcgccctacagatcgtgttggcgctcatcgccgaccgccgtcgttggacaacctacgtcgtggctctgcttatccccaccatgctgattcatggcggcatctctcttgcaatctcctccggggcgattatcggcggcgaccccatcgaaagccgcggcgtgcagttgcaaatgatcgcccgtgtggccagccgcaatccagaaggcatctcggaggaagccaagaagaatctctctgacgtgttcaatctggaccaaatggccgacgcctattcccagcaagatgctgacccggtgaaatcctcaggtattcaagccaagaaagtcagctacaagtggcgcacggtgacgcccgaggacatgaccaatttcaataaggcatggttcgaaatcgtcaaggacaatccggttatcgcactggatgcattgctggccaagtgtttcggctacttcaatgtgaccgaccagccatacgtgtcgatggactactacgtgaccagcgactacgtgcagaagaactccacatggattaagagctacaaccacaactggcgcgagcgaattactggattcacccggagctggggcaagatcccggtgatcggctggattacgcacggcaatttctatgtggtgatgacgctgctgatcggtgccgccgaagtgattcgccgccgctggctcacactgatgacccatattccactactgttgcttatgggcgtgatgattaccgcaccggccaacaactttgaacggcacatgcttccggtggcgttcgtgttcggtttcgtagtgctcacctattggcgtgaatccttggtcgaacgtcggattgctcggcaggcacagtcttcagcatcgacgacaatgaccctgccgcaatagttgcgtaaaacgattgacaatgtgatgccggcagaatcgttgtccagtgccggtaccgccaacgctagactggtatatatgtcagattttctcgaactacttgccgccgacgccgccaattcgtctgatttcacagaccgttccggcatctctgcgaccgaccgtgcacgcactgtgctgttcgagtgcctgttcaatcatctggccgacgaccgcgtggcctcgctcttcaccatccttggcttcgagcatgattttacctgctacgccattgccggctaccccgctcgctccgccgcccgcagccgtgttgacattgaaaagatcgtggccgattttggcggaacatgtctgactgccgaacgtccgataaccggactcacaggcgctgacaatggtacgggccgtaccgctgttgtggccctgattcgtccggtcggtgcggccacgccggaaatcatctgtaacaccatcgccccggctttcgacgccgaccgtcctatcgccttgggaccgcaacgtaccggcgccgaaggcgccatgcgatccgttcaggccacgctgtactgtctgaaagccgctccggccttggctgccaccgcgcagtccctcccccgcccgctgcgcaccgatgacgcgctgccagaacgcgcgctgattggcgacgaagatgctcgcgatgagctgatccgtgtggtgtacggtagcctaaccgctgcaggaccggatgaccctacattgctgaccgtctcgacgttcctgaaatacgggggatcactggagacctgtgccaaggaactcaatgtgcaccccaacaccatccggtaccgtctcaagcgtgcagcggaatccaccggttgggacgccaccgacccgcgtgaggcgtacgtgcttattacggccatcgctctagggcgtatggccacagcacagtaaatcgttttttcgtgttccccgctggcatgcgctgaatcgtatcccataccaattcagcctatgacgcgacaggcctcatcagacaaggcagacgaaggccactgcggctattgcagggcgttgtctcgtacagtaggactgagccgcccccagccggctgttgccgacatgcagcgtgaaatcacccaacccaacaaccaacctgcatatagcaaaaggcggctcccaccacagtgggaaccgccttgattagctactcggagctaagcccgatcaggccagggtgttcggatcaaccggaacgcccgggttcatcgtggaggtgatcgttgccttggtcaggtaacggcccttcacggtggacggcttcagacgcttgacttcgtcggccacggccttgaagttctcgtccagagcggactcgtcgaagctcatcttgccgatgaggaagctcaggttgccgttcttgtcgacacggaactcgatcttgccgcccttgatgtccttgacagccttggtgacgtccatggtcacagtgccggtcttggggttcggcatcaggccacgcggaccgagcacacgacccagacggccgaccttgcccatcatgtccggagtggcaaccacggcatcgaagtcgaggaagccgccctgaaccttggcgatcaggtcgtcatcaccgacgatgtcggcgccggcctcggtggcctcggtggccttcgggccacgggcgaacacgaggaccttggcggtcttaccagtgccgtgaggcaggttgacggtaccacgcacgagctggtcagccttgcgcgggtcaacgctcagacggaacacagcctcgacggtctggtcgaagttgtaggagggcatgctcttgagcagagcaatggcctcgttggcggtgtagaggttgttgcgatcgacgcgctcagcggcttcgcggtacttcttggaacgctttaccatctgtccttctccttatcagtccgtaaccgtgatgcccatcgagcgagcagtgccctcgatgatcttcatgccggcttcgatatcgcgagcagacagatcttccatcttggtctcagcgatttcgcgaacctgcgccttggtgacagaaccgaccttgtgggtcagcgggttctcggtacccttctcaatgccagcagccttcttcagcagagctgcagccggcggggtcttgagaacgaaggtgaaggaacgatcctcgtaaacggtgatctcgacagggatgacctggcccatcttgtcctgcgtctgggcattgtatgccttgcagaaatccatgatgttcacgccgtgggaacccagagccgggcccagcggcggggccgggttggccttgccagcctgaatctggagcttgatcagcgccgagactttcttcttgggagccataatatggttcttctttctataacgcggttcaaatggtcgccgtccgtgtccatctactcagcccaatcggtcttgactcattaggtatccgattgtgctcaatatttggccgcggtcggtctcctcccgcaacttatattgctgtgctgtgctagcgggtcttccctccagacacaagctttcccattatgtcgtctcacccggacaacaactggccataagtccgccccggttctcgccatcggcagcatcatccacagttgttctcatcatcggactgcgtcatccacaatcgccacccacctaacgacatcaatgcaccgccccagcgtcagaaatttaggaaaagaaccgcttcgtcctaaaattctgtcactgagtcaaagccaatgacagatatttaggaaaccaaccccaatctcctaaaatcctgtcactaagactcacttagcgacagtaatttaggacgactgggataatctcctaaaatcctgtcgctaacgaacaggggatgccctaggaactacatagttaccggttacgactgcaattacggtttgcgactacggtcacgatgcgacgagatgcccgatgactaacaacaacaaaaagcccgaccgtgatggtcgggcttttgctattaaacctattagtcgagcttctgcacctggtggaagccgagctccacaggcgtatcgcgaccgaagatggacacgagcacggtgagcttctgggtggtgggttccacgtcggaaacgacagcggccatagtggcgaaaggaccatcggtaacggtgacctggtcacccacggcataggagacctcgaccttgcgcttcttggcggcagcgggcttgtcgccggcggccttgagcgcttcggaggcaatcatcggggccatcatggccacgacttcctgacgggagagcggagccggatccttggacggaccaacgaagccggtcacgccttcggtctcacgcacgacacggcgagcgttctcatccggccacatacgaatcagcacgtagccaggaacacgcacgcgggtgatgaccttcttgcccttttcggtgtgcttctcgacctcttccatcggcacctcgacctggaagatctgatcttccatgccgaaagaagccacacgggactcgatgttggtcttcacccgcttctcgtagccggagtaggtgtgcagcacgtaccacttaccgtcaagggtgcgcaacgacttggagaactcatcaacagccttctggccggcgtcggtttcctcagcctgctcggactcgttgacttcggattcttcttccgccgactcagccacggtttcaggggaagccacaggagcttcggcaacaggttcggcagactcaacggcctcggccggagcatcagccacaggagcctcatcggccgccgcatccacattctccagagcagcgtcgaggttctcgagattcagttcatcactcatgcgttgtcattcaccttcaggttatgcgtaaatcagccgaaaatacccagcgtggccttgcccagaccgaagtccatgccggtaacgagggccatcagcagcaacacgaagatgaacacagccagagaccagaagaacagttccttggcagtaggggtaacgaccttgcgaagctcatcaatgatctgcttgataaacagaccaatacgcatgaagacattcggcttgactgccttttcgtttgtgctcgtcttagccattccgtacctcgcatcagctgcttgattattgaagaaacttggcagggaaggcgggactcgaacccacaacctacggttttggagaccgttgcgctaccaattgcgccacttccctaggtgaagttcacctcggctgacgttctgtagagaacgcttcgccatggcggaaaccgccaaatcgctatagtaacggctggggtggattaaggcaaatcgcgtgtcggataaactgcaaaatcgcctccaaagacgaccaaggggagccgggctcaacgcacccaaaactcccctcaggatgcgctcccctcttcggaggggaaaggaacggtttacttcgcccagtccttgaaacgcttcatgccctcggccagatcgttgtcggcgagagcataagagaagcgcaggtaaccgggagcgccgaaggcttcaccgggaacagcggccacgtgagcttcgtccaacagagcagcggcaaaatcggcagaagtggcgcacaccgtgccgttggaactcagcggcttgcccagcaacgcggtgatatccgcaaatgcatagaacgcaccggtcggagtcgggcaatacacaccctcgatgtcgttcagagccgcaacaatcgcacggcgacgcacatcaaaagccttacgcatctcgtatacctcatccagagggccggatacggcggccaatgcggcacgctgagagatattggccacattcgaagtcatatgaccctgcagcttggtggcagccttggccacttcagccggggcgaccatccagccgacacgccagccaggcatcgcgtaggtcttggccacaccgttaagcaccagtagctggtcgcggcattccggcacggcagcaccgatgtatgtggtgcgcgcatcgtcatagttcaggtgctcataaatctcatcggagataatccagatgtggtgctcaacagcccaacgtccgatggcttccacggtttccggcttccacacggcaccggttgggttgttcggcgagttgacgatgatggccttggtccgctcggtacgggcagcctcaagcgcctccagcgacggctcaaagttcacgtcggcaccggcaaacacctccaccggcacgccatccgccagcttcacggcctcagggtagctggtccagtacggagtggggatgatgacctcgtcaccatcgttgagcaaaatctggaaagcctcatacacggcctgcttaccgccgttggtcactactacctgatcggcgtttacctcatagccggaatcgcgcagcaccttggccgcgatggcctcgcgcagctcgggcaaacccggagtgggcgtgtacttgtaattcttcggatcaaggcatgcatcggcagcggccttgaccacgttcgcaggagtcgggaagttcggctcaccggcaccaaaaccgatgacgtcaagaccggcggccttcattgccttggccttggaatccacggcgagcgtagcgctcggtgccacagtgttgatacggtcggaaagaatctgccattgcgccatagtcatggctcttacgataaccccaacgcacgatgtttggaagtgtgttgtaggtctcaacaaaactggacatccgcatagggtctgtggtgcaatggagctgcgcgcagcgggttgggaaagcgtgccggaggagagattatggcaaagcatcacgaaagccatggcagtcgtgggactcgccgcagcacggtcgagccacgtgtggcgtacagccgccatgccgaaacgcatagcgctcatggcagccagttgcactacgggcaacacgccagccaccgttccgctgccgcaatcgcagcacagcgcacgcggcgtatcgccgtattggtggtagcaaccgtggtggcagtggccttggtaatcactgtcggtgtcgttgcgcatgggtggttcgcccggcagtctgcgccatccatgcaacagcagcttccgaccaccgcgcataaatcacttacccgtaaaaccgtgccgcagttggatcccggcaacatcgtcatcggtgtcaacggcagcgaaaccacctatgtgctcaagggtgagcagtatgtggaaggcggcgcacatgccatcgagccggaagacggcgtactgaccgacaacattgtcactaccggcaccgtagacacgaacactcccggcgattacacggtgcaatacacggttcatgattcaaccggccatgaggcatccgccacgcgcacggtcaaagtagtggacacgatggataagcagaccggcggtattcccgtgctgatgtaccactatgtctacgatccggcgaatccgcctgcagacgttgacgcgaactggattccgaccacgtcactcgagccgcagctgcaatacctgacgcagaacaatttctattacccgtcctggcccgaggtccgtgcattcatcgatggcaagcacagcctgcccaagaacagcatcgtgatgactttcgatgatggcgagccgcacttcttccagtacggcaccccgctgctggccaagtacaaggtgccggccacatcgttcatcataggggccgatggcgaggcactgaacaagatgaagacctacgccacgccatatcttgagtatgaatcgcattcgttcgacatgcaccgcgccggcggcacggtcggccacggcggacgcatcagcgcaatgagccatcaggagattgtggatgatctcaagcagtcggagcaggtaaccggctccttgcaggcatttgcctatccgttcggcgataccacgccagacgcgattgaggcggtcagggagaccggcacattggccgcgtttaccactcagtatggctgggccgatgttggtgccgatcccatgaacttgccacgcgtgcgtattcagggcactggctcgctggatacgtttatcgcggcgattcagtgaatacagcgagtggatgagggcaggctctgacctctcacagttctctcactacgcctatcagctccctcatcagaggggagcttcaacgcaatagcttacaccagtacaagattgtcgcggtgcacaagcggatgcgcgtactgatcgcccaggaatcgcttgagttgagccgtattgcgaccgagcgtctgcggaatctcctcggagtcgaagccggccagaccacgggccagatgcgtgccggattcgtcatcgatccatacaggatcgccggcggaaaaatcgccatgcacatcgagagcgccggcggccagcaacgatgcccgaccaccacgaatggccttggccgcacccgcatcaaccacaatcgtgccgcgcggttcagccgcgaaaccaatccacaggcggcgtgaagatccacgggccttgaccggcgcgaataccgtgcccaccgggtcgcccatcattgcggggcctgcgtttgaggtgcatgtcagcacagtggggatgccggaaacggcagccacgcgagcggcctcaagcttcgtgaccatgccaccggtaccgactttggagcccgagccggacacccggatatcacccagcgcatcgatcacattgggcacgtattccacgcggcgtgatccgggctgggcgggcggcgcggtgtacagcgcatccacatcggtgagcaataccaacgcttcggcacgcaccagattggccaccaaagcagacagccggtcgttatcgccgaaacgaatctcgttggaggccagcgagtcgttctcattgataatcggcaccacgcccagatcgagcagccgatccaacgtacgttccacgttgcggtactgggtggctcgaatcgtgtcttccgcggtgatcagaatctgtcccacccgaataccgaaccggccgaaggcagcttcatagcgggccatcagcaggccttgtcccacggcggcggtggcctgctgggtagccacatcagccggtcgctcatcaaagcccaacgggccaaaacccgcggcgatagcaccggaagagaccagcaccacacgggcacccatcagccgtacctgcgccaatgcggcggcaagagcgtcgagcttgtcaggggcgaggtgcccgctcggctgggtcagggagctagatccgaccttgacgacgatagtgccggcagcggcgatcatgcgccgtacctcggcctgacttggtgtgctcatttgctttccaattccgcctccgacggtggagctgtcaatctgcagccgaccaggaccacccccgtctcgctgtgctcggcagctcccgccggcgggagcaacttcattattcttccgatgcgctatcgtcggcggattcgccgtgaccaaacaggctggtctcatcgtggcgatcatcatcgacggtcgggtcggcccagtggccggccttacgttcagccatcatcgcatcgcgcacagccgcacgggcatccatcatctcgtggtactgggcacgacgttcggcattggagcggcggtgagcgcgcggatcctgctcttcaagacgcaaatccttgccgcgtgcaccaaggttggagccgtcgagcatttcggcaccggcggagatggtcggatcccagtcgaattccaccatgcgatcgcctcgtccgatgcggatctcatcgcctggacgggcacctttgcggcgcagttcgtcttccacgccgagcttggccagtcgatcggccagatagcccacggcctcgtcgttgtcgaagttggtctgcatgacccaacgctccggcttggcaccacgaacctcgtagaacacctcgccgttgccgagctcacggcgttccacggtgaagtcgagtgcgttgccgccctcgtcagcgcggcgaggacgacgaccggtcctttcaagaggcttgatgaccacgcgggcttcttcttcggcctcctcgcggctggccacttcctcgcgcatctcatgcaccagctcagacagggcgaagttcagttccttcaatccctcatgggatgcagtggagatctcgaacaccttgagaccgagcttctcgaactccggacgcacaaattcagccaattccttggcctcgggcacatcgatcttgttcaggataacgatacgcggacgctcgggaatcggaatcgcacccagcggcaactccagcttgtcggcgtagagcgcaagctcgttttccagcgcctgatagtcggacatcgggtcgcgatcaggctccagcgtggcgcaatcaatcacatgggcgatgatctccgtgcgctcgatatggcgcaggaattccagacccagccccttgccttctgacgcacccggaatcaggccgggcacgtcggcgatggtgtaccgggaatcgccggcgataacaacgccgaggttcggcaccagcgtggtgaacgggtagtcggcgatcttcggcttggcggcactcatcgccgcaatcagggacgatttgccggcggatgggaagcccaccaacgccacatcggcgatggacttgagctccagaatcacatcgcgctcttcacccagttcgccaagcagggcgaatccaggagcacgacgggtcttgttggccaatgcgatgttgcccaaaccaccggcaccaccttgcgcaacgacaacgcggtcgccctcatggcgcaaatcggcaagctgctcgccaggatgtttggtcttgccctgctcgccgcgcgcttcaaacaccacagtgccgcacggcacggggaggatcagatcctcgcctttggagccatccttgttgtcacccagacccatcgtgccgttaccggcagtgcgatgtggcatgaaccgatagtcaagcaggctggtggcgttgcggtcggccacgaataccacggatccgccgtcgccaccattgccgccgttcggcccggccaacggcttgtacttctcgcgacgaataccggccgaaccgttgccgccgtcgccgccacggacatggacggttactcgatccacaaaatcactcatattgattaccttacaaaaaagccgcgtccttacgggcgcggcttgaaaagcttaacgctatatcgctcaggcagcgatgacgtcgacgaccttgcggtcacggcgcacaccgaacttcacagagccatcagcgagggcgaacagcgtgtgatccttgcccatgccgacgttctggcccgcgtggaagttggtgccacgctggcggacgatgatgttgccggccacgacggcttcgccgccgaacttcttcacgccgaggtactgaggcgacgaatcgcgaccgttacgagagctggacgcacccttcttatgtgccatgattcatggtcctttctataactcaggcaatcgccgtgatcttgacgatagtcaacggctgacggtgacccttgcgacgagcaacgccagtcttgttcttgtacttctggatgttgatcttcgggcccttggcctcgtcgttcacaacctcagccttgacggacaccttggccagatcggcggcagcaagggtcaccttggcgccatcgaccaggagagcaaccggaaactccacggtatcgcccttcttggcgtcgagacggttcacgaggatggtgtcgccaacctcgaccttttcctgatggccaccggccttcacaatcgcgtacatattcgttccttttatgttttggaaagctaccttgcccaacacgcaccgagcctgcggtcagacaccgagtttcgaatttacacctacacgcggactaaagcaaatggtttttatctgcgtgtcaagcacgacacaccccggcttttcgcaaccgagggcatgcccgcatgaaacatttgtctaatgctactcctcctcggtgttgttggcggccacggcagcagctgcaatctgggccagtttggccttgacatcagcgctggagccggccggttccggagctggggcagtgcctcgaccatgcttgttggtcttgacgaacggatcaccgccgcgcaatgcgtacgggtcatcgtagtcggcggaaacggtcggctgatcgtgcaggataaagccacgacccttgcaagtcgggcattcctcggagaacgcctcgaccaagccctgaccgatgcgcttacgggtcatctgcaccagaccaagcgaggtgacctcggccacctgatgcttggtccggtcacgcgccaggcattcgactagacggcgcagcaccaagtcacggttagcgggcatgaccatatccacatagtcaatcatcaccatgccgccgatgtcgcgcagtcgcagctgacgtgcaatttcctcagaggcctccaaattgcaacgcgtcaccgtctcctcaagggacttgcccttgccgatgaagcggccggtgttcacatcaatggtggtcatggcttcagtgcggtcgatgacgatcgaaccaccagacggcaggtagacctgacgctccatgccctttctgagttgggagtcgatctgccacttgtcgaacacgtccttgccctcatgctcggccgggtcccacttctccagcttatccttcaagtcgggggccatggtgtcgagatactcctcgatacggtcgtagaccttgtcgccttcgacgatgagcttgccgaagtcatcgttgaagatgtcgcgcaccacacggatagccacatcgggctcgccctgcaggagcttcgggcgcttgccatgccagaattcctcacgcttggcgttgatgcgctcccactggcgaaccaaagactcaagatccttgacgatggcttcctcggaggcaccctcggctgcggtacggatgatgacacccatatccttcggggcgatcttggagacgatgcccttgagccggctacgttcgcgttcggagagcttgcggctcacgccggtcatgccgccggacggcacgagcaccaggaagcggccggcgagcgtgacctgagaagtcaggcgggctcccttgtgtccgatcggatccttggtgacctgcacgagcaccgggtcgccggacttgaacgccaactcgatgcggcgcggctggccttcgagacgcgcggcgtcccagttgacctcaccggcgtagagcacgccgttacgggcctggccgatgtccacgaaagcggcttccatgctgggcagcacgttctgtacacggccgaggtagatgttgcccacggtctgcacttcctggatgtcggagacgtaatgctcgaccaggatgttgtcttccaccacggaaatctgggtgtgatgttccttctcgcgcaccaccatgaggcgatcgacgttctcacggcgtgcgaggaaatcctgctccatgagctggctctggcggctacgctcacgacgattgtcacggcgtcgctgtttcttggcctcaagacgggtggagccttccacatcggtgatctcatcgatgtactgctgcttgcgggagcggcgagtcagctgctgatcgtcctgctcatcaccgctctcggcattcttgcctccgcggcggcgacggcgacggcgggtaacggtctgctcctcgtcatcatcacggtcgcgctcatcgcgatcatcgcgacggcgacgggaatcgtcaccattgttctcggaggactcgctgtcgttgttggaagcaccggactcgttgcgggagccacggcgacggcgacggcgggaacgggtgcgggtggagtcggactcttcgtcgttctcctcttcagcaatcggcgagtacgtaatgtcatccagctcgaggtcttcctcaatctgctcgacttcggcggcagcacggcgctcctgggcgttcaggcggcgagaacggcgagaacggcgagaatcggactggtcatcagcgtcgaaatcatcctgagtctcattacggcgacgattattgcggctgtcatcgcggtcatcgtgatcatcgcggtcatcatgatcgccgtgatcgctgcggttcgaccggcgggaacgagacgggcgttcctcgtaatcggcctcatcctcacgggcgcgggagcgacgagaagagcgggaacgctgttcgccatcatcttcctcatcatcacgatcgtcatgtcgcatgtccgggagcaccggctcttggaacagcagggaagtcatcggcttgccccgacgggcggattcatgccctgcaggcagcgcatcaatcacatccagcacgcgctcatcggggttttcttcgcgcgcgtcttccgaagaacggcggctgcgagtacgacgggccgagcggggctcgtcatcgcggtcatcgcggtcattcgtagtggaacgacggcgacgcaccggacgatcgccatcctcatcggagtcgtcgaccgcagtacggcggcgagatgaacgcggcgcatcatcatcttcgagatcgtcaatcacagagcgacgacggcgaatcggacgctcatcgtcttcctcgagatcatcggacaccgcgcgacgacggcgcaccgggcgcggctcatcatcgtcatcagccacagcacgacgccgagtcggacggtcctcataatcggcattatcggcagagcggcggctacgggtgcggcgcgccggacgcttctcgtcatcggaggcgttattgtcggcagttcctgtggaagcagatgcatcggcatcaggcaaagcgggtgcctcaaacagcggggcggcgtgttcctggacttgcagctcaagggatgcgccggcagcaccggtgccacgcactacacgacggccaccgcgacggcggcgagtcggctgcgatgcttcggcgttcggctcggaagctcccgaagcctgtgattcagtattggatacggttgagttatcggtttcgtcaccgacgaaaccttcacggttctcagtgggcacaatgctcctcgcggcacgctgcatcgcgacgccatccaggcctgtacgctcgtctcacaccatgctctcaccatggccgcgcaaatcctttgcgccgcgtaaaggcaacttcgtctcaagtctgtcctgcgaacggcggacaccggcgcttacgttgtctcgttctcgagagccgtaaggggatcaacgccattacacacgctgatggttatgcagaaccaccgtctttcagtatgccacactttttgcacgggcgcgcccagcgctctggcacaccacgacctatctggctccccttacacacggatgagccctatcttggctctcctctctgaggggagctggctgcgaagcagactgaggggagcctggattcaagccgagcactcccctcagtcacctacggtgacggctcccctcaaagaggctgagccgaaaaatctcacaccagccagtcttcgaggattgcggccatagcagtcaaatcagattcgggcacttgctcgtcgtgcttatgcgccagtaacgggtctccggcaccgaggttgacggccggaatcccgagctgagagaaacgtgccacatcggtccagccaagcttggccagcggatcgcgaccagtgcgctccttgaccagacgaaccagttcctgcgcaagcggcgcgctcaggccggggcgtgcagaaggactctcatccttcatctcgatgccatagccctcaaacacgccaccggtggccacatgttcgccgttaccaagttcagcacctgtatccgcacccatcatcagcgccttggcctcagccaggttcttgtccggagcgaaacggtagttgacatgcacacggcattcgtcgggaatcacattcgtgcccttgccgccggaaatcaatgtggcgttgagaccctcacggtagtcgagcccatccacattcacagtcgcggtttcataagcattgagtcggttcagaatatcagcggccttgtggatggcgttctctcccatccaggcgcgggcagagtgcgcggcgactccgtgcgtgaccacatcgaaacggatcgtgccgttgcagccgccttcgatgccactattggtgggctcaccgataatggcaaaatcaccggcaatccagtcggggtgcgtttcgaccaccttacgcagaccgttcttttcggcggcgacttcctcgtggtcgtagaacacataggtgaggtcgactttcggagtggttcccgatgtgaggccatcaagtgtagcggcgagatacagcatcaccgcatcggaggccttcatatccgtggcaccacggccccacagcacacggtttgtgggatgggattgggagatttcctcgcgaatgagcggatcaccaggttcaagccacttcggagggaagttgtcgattaccggcacggtgtcgagatgaccggacagaatcacgcgattcgacttgccaaaatcggtgctggccaccaccgtgtcgccgtgacggcggacggtcagatgcttctgttcattgaggaaagcctcaacctcatcggcgagcgggccttcatgatcggagacagaaaagttctccataatctgggtgagcaggctgttcaactgctcagcagtggaatcgttgcggttcaattcaagcgtcatgagtacagagtaccgcgtgacaaagcgcacagttcacccactacatgagattttgtcgccgaatacatatttatgtgtcacactagggtggcgaaagggaggaacatgccaggtctcatcagcgccatgcaaggcttctgcgttatcggcatcgtgattgcggtgggatatgtcgccgctcgaatgcgcatcggaggcccgtccgctcagatggtgctgaaccgcttctctttctttgtgtccagcccgtgcctgatgtttgcgattctgtccaaggaaccgattttcgacatcttccatccatcaatcatcgtggcgttcttctctgcggtgctagtgggcgtggcgttcctggtgctcaatcagatgttcttccacctgaacgccccggatgccaccatcggcgcattgaactcgctgtatctgaactccaacaacatcggtttgccgattgccacctatattctgggcaacccggcgctagtggcaccgattctggttatgcagcaggccatcttcacgccggtgggcctgactgtgcttgatgtgaccaccaagggcaaggtctccgtcaaggagatcgccaagcaaccgctgcatcagccgctgcttatcggctcgctgctgggcatcgtggtctctgccatctccgcaaagatcggctggttcccggtgccgaagttcatcttcgacccgattgacatgatcggagactctgcggtgccgatgattctgatggcgttcggcatgtccttgcacggcaccaagccgttgcagcagaagggcgatcgtccggccgtcttcaccgtagcggtgctcaagaacgtgatcatgccgatcatcgcgttcctgctcgcctacttcgtgatgggcttccgcggttccgagctgtatgcctgcgtggtgctcgccgccctgcccaccggccagaacgtctacaactacgcggctcgttacaacgtgggcctcactttcgcgcgcgatggcattctcatgagtaccatgaccagcccggtgtttatcgcgatcatcgcggcgctgctgagctgagccggcaactgtaatcacagtaaaaaaacttccgcgaaatccaccgtaggattccgcggaagcctgagatatacgctacttgagaatcgccttaatcgcctcatactgctgagcagtgagttgcaccgctggctcacggatcagggtggaaatgttcagtcccttggccttgaccgcacccttgatggcggagatgaacaggtcggtctgatcgtacagcgccatcaggtggctgatgcgttcggcggcctcaattgcggtgccatagtcgccggcctcatatgcacggtgcagcgtaacgaaggtctccggctccacattggtcatgccgcagatcacgccatcgccgccggagacgcggttgacgagatagtactcgtcgaaaccggagaacaccgcaaaccgtggattcacggccttgaccgcgcgaatcaccttgcgggtgtggctgattgtgtcgaccgtgtccttgatgccgacgatgttcgggtgcgcggcggcaagctcggccacgagctccggggtcaagtcgctgccggtgcgcggtgggaaattatagaggatcaccggaagattcgtcgcttcagcgaccgcgccgaagtacgccttcgcgcctcccgcagtagggccgaagtaatacggcgaaacgaccacgagcgcatccactccacttgcttcgactgcccgcgcgaagtcgatcacattgttcaagttggtatcgcccacgcccgcgaacaccttgatgcgcccggcgacatgcttggccacgaagtcgaccgcctgcttcttgacgtccagagggaaggcatagaactcgccgatgctgccaaacaccagcacgccgttgataccggcctcgatcagatgatcgagatgctgcccccaacgttcatagtcgatgtcaccgtcgtccttggtgatggtgatggatgggcagatgatgcctgagaattcggcgctgcttgtcatgattgttcctttcgttacggaataggggtgccgcacaagcggcaccgggtttgcggcctctcccccagtcgtcctgcggacgatagccccctcatcagagggggcttgggtttagtcgatgttgtaagcgcggcgggcgttgttttcgaagaagtcctcgtcctcgccgaacgtgtccagcatgagttggaagtgcgtggcaaaggtcgagttgagttccacgaccggccagttggagctgtacagcaccttcttcgggccgaatgtgtcccgcacgtatttcacgatgtccgggtccaccgggttgtcgccggaaaccttgatatacgaattcggcagttcggccaacgctgcgagtgcggcgcacgattcctcatcaagcccgggcacgttgccgagatgatcgatgatgaccgtcacttcaggaacctgcgagaacgccttggccatgtcgcccaactccgggccccggttgcacagctcaaaaggcattcccttgacggccatcacacgtaggccggcgatgaattcgggttcgagggctcggccccgtggctcggaatccacatgcagcggctccctgatgccatcggcgttgatcggaacacgcatccatgggcttacccgcccctgcagcatgcgcttcaggatcagagggctggcattctcgtacaacaaccggtcctcgagctcgtgatcggccgcgtcgacctccacatatacgccgccgaggaagttcacgccaaacttggcgtactgtgcggctaggtcttcaatcgtgtacttgtgttgcagcgagggcaatcctgccagccatggcaaatcctgcgcatccggatcccagatatggaagtgggaatcgattacgttgagtgtcatgtcaggcctccttcagaccgatcttggaaccccagaatgcgtaccatgccacgaacaggaagcccgggaccatcaccaggatggcgatctcgatgcctgccgcatcctgaatcacaccgagcagcagcggaatcaacgcggcgcccacaatgctcatcaccaaagccgaggaaccggtcttcgccgcggaacccttgatacctttcagcgtcagggagaatatggtcgggtatccgatggaaatgaacagatacgccaccatgaacgcgatgacggataccttgcccaggccaaggaataccacgaacatcagcacggctgaaatggtcatgtatacgccaagaatcttcgcgggatcgaatttggccatcaatggggtggtggcgaagcgtccgatggtgaacagcagggaaagcacggaaagcatcatcgctgcggtgccggctgtgacgcccgcgccccagtgcttgagcgcgtaggcggagaagaccgccatgccggccacttgcaggccgatgaaaatgaactcggcaagcacgcccaatgcgaagtgcgggcgcttgagcaggccgaagaaggagctgttctcggaggaggcgccgcccgcggcctcctcttcgtctcccggaggcgtgggcagcttgaacagcgcgaacacggcgagcaccacgaccagcacaacgccgatcacaatgtatatcgtgcgggtatcattcaggaactgcgtcttagcggcgtcgaagccggactcgcctgatgcgacggtggtgccgagaatctggccaagaatcagcgggccaacgatgttgccgacgccgttgaaactctgcgccatgttgatacggaacgattcgcccttttcatcacccagcttggtgatatacggattgcagttggtctccagcgatgccgcgccgagcgcgataacgaacatggcgaacaggaacaggccgtagctggccatgctggtggcaggaatcaccatgaacgcgcccagagcgaacaggagcagaccggagatgacgccgcccttataaccgaaacgcttggcgatcaagccggccggaatggccatgacgaagtatgcgccgtaataggccacctgcagtaatgacgcttcggcgctgctgagttctatgtagtttgcgaacggcgagttcaacgcgttcacgaggttcatggtcaaaccccagataaagaacagtgaggtcaccagcacaatggcgatggtcgccttggaaccggttgtgtttttggatgtcatcattgactccttagtgatacgagtttccccgatattgcctagcgagaagtggaccaccctgggccatgttggtaaacggatgacccagggcgcgggtgatacgggcggcatacgcggatacggcgtacggatggagcaatgatcaaagctccggaattgccgcgcgaatattcgggaaagggctgcttgtcagctcagcgcacggtcaaggtggacatagccgccatcgacgtacacccactgaccggtggtgtggctggagcggtcggagagcaggaatgccgcttcattaccgatctcttcggtggtggtcatacgatgttccagcggaatcttgtcggtgatcaccgacaggcgcgcctgctgggccgcttcatcgccaaaggtcttgatccaatcggcatagagcggggtccagcactcggagacgactatggcgttgacacgcacgctatcgtgcaccaatgcggcggcccattcacgggtcaggcccaggatcgcgcccttggcggccgcataggcgctggtcttgccttggccggtaagcgcggtcttggacgagatgttcacgatggatccgcggctttccttgagatacggcacggccgcgtggaccagctcgtaatagtgagtcaggttgccgtgaagcgattcctcgaactcacgccaagtagtggtctcgagatccttgttgtcgttctttccggcgttattcacaatgccatcgatatggccgtacttcttgtatgttgcttcgacgacgccggcgatcttgtcggtgtcgttgaggtcaagcaagtgcacatcataggtggtggtgtactgctcgatatccttcttgaactcgtcgagagcgctgtcgggtcgattaatcaccaccgggatggccccctcctgggccagttgcagcgtgatgcctttgccgatgcctttgaaaccgccggtgatgatgatgactttgccttcgagatgcagatccatgggaactccttcgtccatccttattctgcgtttcatgggtgttccatgtcacgcccggccggggcttcggcgccccagccggagtggttgtgtgttgttgtgttgagttgtgttgttcagttatgaatttccaattgcggtcagcagcgatacaggtacttctcggccgtctccagcgtcatttcggtaccgttgcccggagcggtcggagcgacgtagttgccgtccttgatctcagtcggatgaacgaaatgttcgtgctgattatcgacatattcaatcattcggccatccatcgtgccggataccgccacataatcgaacatcgcgaagtgacacacggcctcgcacagacccacgccgccggcgtgcgggcagacgggcttgttgaacttctttgccagcaggtattcgagcacgatctcctgcggaccggccactcgggtggcgtcaatctgcatgatgccgaaggcgttggcctgcaggtactgcttgtacagaatgcggctctgcatctgttcgccggtggcgaccttgatgggattgatggcgcgcgcaatcgtggcgtggccaatcacgtcatccgggctggtcggctcctcgacccacgccagatcgaagtcgtggaacttgttgatccagtcgatggcggtgggaacatcccacacctggttggcgtccacggcgaggcgcacgtcggggccgatggcctcacgggccttggacaagcggcgcagatcgtcattgatattctggccgaccttaagcttaatctgcttgaagcccttgacctgggtctcctccttggcgagggccaccatcttctcatccgagtagccgagccaaccgggagcggttgaatagccggggtaaccgacctccagcagatgcttgatacgctcggccttgcccttctgaccctctttgagaatcgcaacggcttcctcagggcgcagggcgtcggtcatgtagcggaaatcgagcgtggagaccagctcctccggctccatctcgcccagtagcagccacaacggcttgcccgcacgcttggccttgatatcccacaacgcggagagcaccgcgccgatggccatatgctccacgcccttttcagggccaagccaacgcagctgggaatcatgcacgaacaggtcccatgcaatgcgcatgttgtcgagcagttcctcggtgttgcgcccaatcagcacctgcgacatcgattcgatggccttgcaaaccacgtcgttgccacggccgatggtgaacacgaatcccacacccgtgatgccgtcgtcggcgctggtggaaatctccacgtacgcagaggaataatccggatcggggttcattgcatccgagccggaaagcgtcgttgaagtggggaatcggaagtcatacgtcttgactttggtgatggtactcatgtgttcgggctccttcgcctggtgtgaaccaacggctatatcgtacgtccgaataaagaaatttgcaagcctatttgcgaaaatttttattcaaggccggacaaagggcaagaaaacacggaattgttacggcacaatgcgtcataatggtgggaacatcgacgaaatcgtctcagtaattgaacggcgaatatccaagagggaagcaccgatggttaacgatacatccacccacaagctcaaggtcggcgagctcgcaaaaatcgccggcgtatccgcatccactgtttccaaagtcatcaatggcaggccaggcatttccgacgagacgcggagacaagtcgagcaaatcctcaaagatcacggttactcaaggcctctggtcaacaccaaactctcccccaccatagagctcgtcgtcgaatacattgagcacaacggcacgatggaactcatcaaatacgcctcatactgggcgcagcaggcgggcctcgccatcacggtcacccagaccaaccatggcgatgccacggaagactgtttccgcggcatcatcgatagaaatccccaaggtgtgattatgcagcagatgggcggtctgaccactcaagcgaagtctttgttgaaatcgcgcagtattcccgtggtcatcatcgacccaatcgataccgtcgattcggatgtgatgagcgtgtccatcgataactggaccgcaggataccaggccggcaaacacctgctgtcgctcggccatcgacgcatcgccgttatccgggggccggcgaacctacagaccagcatcgcgcgctatagcggattcaccgccgctctgcaacaggccggggtggatctgccggagtcctatatcgaacagggcgactacttccccgccgaaacaagctatgaagcagcctgccggctgctggaactcaccgaccgacccaccgcgattttctgctgcaacgacttatctgcggtaagcacgtatcgtgccgcacgagagcataagatcgcgttgccaaagcaattgtccgtcatggggttcgacgacattttccccgccggccaactcatgccctccctgaccagcgtgcatcagccgttcagcgaaatagcccaacgcgccgtgcagatgatcatcgacagccgcaagggcaatcagggtgatatgcacgtcatcctccccaccagtgtcgtcacccgggaaagtaccgtaccgcctcagtcatcggcccgataatcggccagattcaagctggcggccacccgattggacgcgaacgcacccaccgaaaccagcgcatagcacagcacaagcccgccgaagaagctggccagcgtggccggttcggtcatcgaagcggcgaacagaggggccataagcagcatggaacagccaccggccacgatcaccacgatgttgagcggggtgagtacctcgatgaatcgcgcacggttcaaggtcttgacatcagtgccctccaacaccagcatgcgatattcgccggcctgatcgtacacgctgccggcctgcatcacaccggagctgaccgcggcaagcacagcggcgaacacgagcgtcagaatgccgccggtgccgatgtcgcgaatgaacacggtgaacgggtcgttggcgtcaccgaccacggcggccgatccgaagaatccgcagatcgaggtgatgccggcgatgaacacggccagtgcaatgccggacacattgcgccacgcgcgcttcggattgtcgagaatacggcgcatggcaatcatcgtggccgcgtccttgggccgtttggccttggctttggcgcgggcggtgaccacccaggagcccacgaggttcaccagcgcgaagcacagcagcatgaaaccgatgatcacgccgtacatcactacttcaccggcctgagccagcaccatcggattcttgaacagaagaacggcaatcaccatgatgacggcgaacaccaccacacgccagccggacggcagcgtagtcgcaacgcgtgaagtgacgccgagtggcgtgatggccacgcgccgaagcgtgaccagcgaagagatcagcgccaacacggtcacgccaacaagcgtaatgatcaaggcaatcggccccacccacagttgctcgaacgtaaacgtctgattctggaaatgcagcaacatgattagggggatcaacacgcagtaccccgcgatgccaatcagcgcccccaccaaggcctgcccagccgcatcaagcgccgtaaggcgaataacttgccccgtggtcgcgcctgccaagcgcagggatgcgagccgagcgtcacgacgggacgcagccaatcgcgcggcggaaccggcaagcgccacgaacggcacaatcagcagcagacaggcaaagaacgccagcacgacgtatgccgtggcgtattgatccaggctgtggggattggcgatacgctgcttccagatttccgctgttccgggtttgcaagcgtcgagattgattgcgcatccaatggtgtggtcggcggaggcgcgccacatgaacccatgcacgccgcccaaaacggtgagaaagatagtggtggctgcggcaaaagcaatgatggccaacaccgaagtatgacccgcactgccacgcgagccggggcgatggaacaatcgccacaatgcgaaagcgctcatcgtacgcctcccagctggccgtcctgcatggtcacggtgcgcgagcagaacgaagcgacgttggggtcgtgggtgacgacgaccacggcggaaccgttgtcccgcgcggcggccatgagaatgcccatgacctcgcggctggtggcttggtcgagcgcgccggtcggctcgtcggcgaagaccacggcaggtttgacggcgagcgcacgggcgatggcgatgcgctgcatctgtccgccgctcatctcccccggccggtgcgtggcgagcgcgcgcaatcccatgcgttccagccacaggatcgccgtgtcggtggcggtgcggtatggcatgccgtcgagcatcatcggcagtgcgatattttcgactgccggcaattcgggaagcagctggccggattggaagacaaaaccgaaagcgttgcggcgcagtttggtgcggccggcatcgctcatggcatccagattcgagccacggaaggtcactgtgccagcggtcggcttgatgatgccggcgagcgcgtgcagcagcgtggacttgccggagccagacgggcccatgacagcaaccgtctcaccctcacccaatgcgaagctcacgtggttcagggcaagtgtgtgcatggttggcatggcgaaaccgggctgaccattggcagcgggaaccgcagcacctgttccggccggaatcacactggtaacgccatgaccggcctgcgcacgggccatactggcggtgtagtccatgaccaagtcatgtgcctcgatcaccggagaccactgctgccgtgcgtcctgttgttgcactgcttccggtgcggtctgagtctgctgaaattgctgtgttgctgtattcatactcccgagagtacagatcgagcagaagcctgaccatcaggctgcggtatgaaccttttcaactgccccacccacctctcatccgcaaggattagagattcgcagtcgatgcgacaatacttttatcaatggcaatgtggataacttcggaagctggagccacataggtcgattcggctggacatgcgaatcacgcgaacggtatgttcatggaatcagcgtgctgcacgctcgcaaatcggacataccaagcaaaggagctcacgtggccatcgcaatcgatatcccaaacatatcaatttcgtccgtacaaaagccgtacaataggggtatgactactgagaacaacaagaacagtcgttttgagatgaggctcactcaagaacaacgatccagaatcgatcaagcggccgagtccaaaggcctgactgcgtcgcaatgggcattgtcgaatctgctcgccgccgcagacagggatatccatgaagctcacatcattcgactgaacaatcaagcgtggaatgatttcaccgccgcattggacgaacccatgggaccacgtctgactgaattgttggaaagcgatccgatatggacgtgatcaacttcaccaagccccgacgcctgactgcaaacgacgacatctccggtttcgattgcggtctgtcactggtcaatgattggctggcaagacatgccgccacggcgggtagacaaggcactgccgtggtctatgccaccttcaccaaggacatcaatggcactgatatgctggctggattctacacactgagcgcatacagtattgaacactcgggggcttccggctggctgaaacgcaatagcccgaaccccatccccgcaattttgctaggcatgatgggcgtggacatcagatttcaaaccatgcatgtcggcagtcaactactccgagatgcggtacttcgttccatgaacgccgccgccatcattggagcgcgagcgctacttgtagaacctgccaccgaccaagcagttgcattttacgaacgatatgactttcggcacatccccaaatcatccagaatgttcaccccactcaatatccgcaatcaccgatgatgtgcgatcggtaaccactattcagtgccggtcattatcagaatcgcattcaggcaccgcactcatccttgcgcggcggccagctcatccagacgtgcggcgaagcggggccagtcggtcttcatggcggtgaggagcttgcggttgggcacgtcatcaatcggcacccagcagatttccatgctttcgtcgtcatttgccttgggctcgacggcgtggccgggcttttcgaaggcaaacacggtggtgtaggcccacgggccgtggtcctcgcggtaggagccgaccacctcgatgtcttcgggagtgatgttggcttcctcatagctttcgcgcagcgcgccctcgatgggcgattcgccgtccgcggtggcaccgccgggaataccccacgtgccgccttcggcgctccacgcggcacggtgctgcatgaccacgtgggtcaccttgccgctcgcagcatcgcggcgagccagcaaaatgccggacgcgccgttggtgccccaatgcttgcgaccgcatgcgcaatccacccagccgtcgccaggctggtgcacgttctccaccggcggcagaatgccggcgtgctggttgcccgaagccttgctctccggcgccagctcaccacggtctacgttccacaggtcagtccatttgacgcctaattcaccagccaaatgccgagccagcggcaagctgaggccgatgataccgtgcggatcgccctcgatgctgtcaatgaacgcaccaccgaagccctcgagcgtgaacgaaccggcgacttccagcggctcgccagtggcgatgtaccgctcgatatcatcctcggcgaactcaccgaaatgcactttggcgtgacttgcgccgcgcacagtacgtccggttgcaaaatcgataaggcagtggccggtccacagttcgccggtcgcgccgctcatacgcttcaatcgttcgcgggcaacggcctcgctgtgcggcttgccgtagcatactccgtccaagaggaacatcgaatcacaaccaagaatcagcggtccgaccgttgcctcggtgagtcccggctgattcgctatggcagtagcgataggttcggtgacggtcggcatatccacgccagaaaaatcacgtgtggtggcgatttccgctttggaatagtcaatgggcttaccggcagcggccttgcgcaggtcctcaacagcagcttcgtgctccgaatccctgatttccttggctttgagcgggtaagcaataacacggtcgccggtcgcggcggcagccgtatcagccacatcacgatacgcacgatgtacggcctcggctttggcggcggccagaatcatcacacgctgcttgatactcaaatcatcgacagtcacgccttcctcacgagcagccacctcgagcacggctggttcatccacatgcgatacgcgaatcgtggggcagatgccccccgaatacaacacatcgcggcgtggcttggacttggatgcaaggattagcgggatggacatgtggctcagaccttcagtagtaaagcggctcccctccctgaggggagctgtcgaacgaagtgagaccgagagtggtctctgccgctaggactgaccaccctcagaccgcctgcggcggccggctcccgccagcgggagccttctcctcgacttagtggcgttcgatttcgacgccggcggtgttgatgggtagatggagtacacgccagcgaccggaagcgagctgctccgacgccagctgatcaatagcctcgcgggcgtcgccgtagtgcagcacaagcacgcagggaccggcaccggagacggcagcggcatagcccttggctcggaacatggcgatgagatcggtggacggcggcatcaaggcaccacgatacggctggtgcagcttgtcctgcgtggcggcgaacaacagtgcgttggcctgggccgcggctgcggcaaacgcctccgcaggaaccggctcatgaatgttagtcacggcttcagaggcacagccacaagcaccgtgagtggcattatcacggcaggcgcaagctgcggagtctgcagcgacagcggccacgccagacttgccctgctgcgcggcctgtgcaagtaccacgggattcatcgcggcgggcagcaggcccacgcgggacacgttgtagacggcatccttgtacggcagttccttgggcagcgcctgacgggccttttcggtggacagctcgtaatcaggtacgaacacggcagcggtgatggccggatcgaccggatagttgacggcatggaatccgccgtgcagcggctcgccgccaggaatggccactgaaccaacgccttccgcggtctcgaagtcccacgagacagtcagaccgccgaacaccgccggtgccacgttgtccggatgcccctcgatttgggcagccatgtcgaagatggcagggcgattaaggtcgcccacctgcgcaaaggccgcagccgcggcgataccggccacgatggcctcagcggaagagcccatgccgcgagcctgcggaatactgttggtcgcctccagcgtgaaaccgagacggcccagaccaaaagtggcacaggcacggcggaaggtggagaccaccagatgggtttcgtcgtgaggcaatgtatcggcgccttcaccgtggataatcacgtgagcgatgccgtcgttcggatcatcgttaagcgtgaacgtgagctcatcgtgatagtcgagcgccaagcccacggtgtcaaagccggaaccaaggttggcggaggtggcaggcacacgcacatggacgctgttacagattggattcatggttgttcctttggagcggaactcccctcagtctcactacgttcggcaggcgactgaggggagctccactcaaaataaatcagtccagcacgcgcaggatggacggctcaccggtcacgaagtcgagggactgcacagccttgacggtgttgcgcagggtctcttcgtcggtcaggtgagtcaccacgcgcagctgctggatctcaccgtcataaccgggatcggtcatagtgggcttcaagtcctggttcacgccgttgatggagacgccgttcttggcgaactcggcggcgatggcagccagcacacccggcttgtcgtgaataaggaagcgcacggcaaatgcggccttggaagcggtaatcggagccttcggcagattcttgtacagcggaatggaggggccagtgcagccagcggcaatgtgacgggcttcggtcaccacgtcgcctacaacggcggaagcggtcggagcgccaccggcaccgcggccgtagaacatcagatcgtcagcagcctcagccttgacgaacacggcgttgaaggagccgtgtacggaggccaacgggtggctctcgtcaatcagggccggatagacacgagcagagacgccggcttcgctattctcgaccacggcaagcagcttgatgaccttatgctcggcggtggcggcggcgatgtcatcggcagtgatcttggtgatgccttcaacggacacatcgtcgatggtcacggaggtgtggaagccgagggtggccatgatggcggccttgttggcagcgtcgtagccctcgatgtcgccggtcggatcggcttcggcgtatcccttggcctgagcatccttcagaacatcatcgaactgaagacccttggtggtcatctcgtcaagaatgtagttggtggtgccgttgacgatgccgagcatgctggtcaccttgtcgccgaccagggactcgcgcagcgggcgcaggaacggaatcgcaccgcccacagcagcctcaaagtaaatatcaacgcccttggtctcggcggccgcatagatttccgggccatacttggccagcagcgccttgttggcagtgaccacggaagcgccggattcgatggcggcaagcacaaacttgcgagccacggtggtgccgccgataagctcgatgacgatgtccgagttggtggccacgctcattgtgtcggtggtgacgatggactgatcaatccacgggaacgcttcggtttccttcggatcaaggcaggcgacgccggtcagttcaatcggccgtccgattcgggctgacagctcgctcttctgttccacgatcagtcgggcagtctgagatccgacggtgcccgctcccaaaagtccaacgcgaatagggctttcattcagctgtgccacaaggttccttcctattgatgccacatcatccgccaaaggccgcggcggatgtccgcttactatcctacgtaaggaatccgacacgccgtggcggaaaatcttcatcgaagcgcatgcggccaatatcgattgaatctttccaatcgccaggctcactggtctgtcggtggccatcgccgcagcaatggactggatgtccggcttcaacttctcggccggtttggtcgacttcgttctaggctggccgctggcaacaaaaccttacatgctcatcgtgcaaggcctggtgttcgcagtcatctactacttcgtgtttgactttgcaatccgcaagttcaacctgatgaccccgggccgcgaggccgaggaagtcgctgctgtggacgaggctccggccgccggcgaagacaagtacatcaccatggcctcccgcatctacgcggcgctgggcggtgcttccaacgtcaagtccatcgaaaactgcacgacccgcctgcgcttggtggtgaacgacacctcgctcgtcgatcaggatgccatcaagaagaccggcgttccggccgtcaaggtgctcgacaagaccaacctacaggtgatcgtcggtacggatgtgcaattcgtggctgatgcgatgaacgacatcgccaaaggtgtgaccgttggaggcgacgcggccccaaaagcgtgacggcagcacccgctgccgcccctaaacccgcaggcacagcttccacagccaccgtgcttgccccggtcgatggcacaatcgagccgattgaccaggtgcccgatgagacctttgccgagaagctcctcggcgacggcttcgcggcgataccgaagtcaggcacgatcgtcacaccggtgtccggcaaggtgtccacagtcgcccaggccaagcacgccgtcggtatcaccaccgacgcaggtctggaagtgctggtgcatatcggcatcgacaccgtgcagctcaatggcgacccattcaccgtgaaggtcaccgaaggccggcagatcaccgcaggcgacccgatcgtcgaggtggattggaacgcggttcgcgctgcaggcaaggccacggatgtgattgttgtgttcaccaacccggcgttggtggatgcgctggccatcacagctgccggagctgttaccagcggctctccggtcggtaccgtgaccaccaagtaagcaactggttccacatagagggcctcccgtctcgcggcgggaggccctctcgtatgcgttattggacggcatcgaacagctatgccgctttgtcgtcagccttgatccaagtccagcaggtcatcgatggtctggcggcgcaacataacatgcgcgccctgctcagacacggcgaccacagctggaatcaacgcctggttatagttgctggccatagtacggccatatgctccggtgaccggcacggcaagaatgtcgccgcgcttcaaatctgcgggcaaacgcacctcatggaccacgatatcgccggattcgcaatgcatgccgcacacgcgggcaagcatcgtctcagtagagccggttcggttggccaaacgtgcggtgtaatcggctccgtacagtgccggacggatattgtcggacatgccgccatccacagacacatacacacgctcgtcaatcgggttgccggcactgtctttggcatcgctcaggtgcacatgcttgatggtgcctacacgatacagggtcacgccggctggagccacgatgtaacggccgggctcgaagctgatggccggagcgggcatgcccagagcacgattggtgtcgctgaccgagacggccagacgagtgagctccacatcgatgtccatggaatcttcgtcgtcggtgtaggccacggagtaaccaccgccgagatcgatttcgggcaggatgtaggcgtcggtggcccacagggtcttgcgcagcagcatcatgcgcttggcggcgtggatgaaggcatccgcgtcgtggatgttggagccgatatgcgagtgagcaccgaccagttccagcacatcctgattggccaggatggtcttgagcacggcaatggacggaccgtctgcgatggcttccatcgcggcggcaagtaccttatccgtatcggagacttcctcatggctcaagtcgtacggatacttgacgtcataacgcagttcgcgtgccggtttgccgctcccgctggcgggaactatcggcgcagtcgactgagggtggtcattgccagcgttaacgtccgactccgcaatacgcgcgttggtcgcggcaggtgtcacgtccgtcaggttgttcagcacgtcgagcactgcggcgtcggctccggccgccagcagcgggacgccgaacttctgatcctcgtgagcggtggagatgtattcgtgaccaccggcatgcacgccgacagtgacacgcagcatcacgcgggcacgcttgccgagtttacgggcgatggcagcgatgcgctccggctcattaggctcatcgaccacgattttggcgaagccctgttcgatggccagcgcgatttcatcatcggacttgttgttgccatgcagcactaggcggcggccgggcacaccggcagcgagggcgattcgcatctcccccatcgtgcaggtgtccacaaacatgccagcctcggcgaccagtcgcacgatttccttggacaggaacgccttgccggcaaagctcacgtgcgtggtggaggtgttgaatgcctcggctgcagcgcgtacgaagtgcttggcacgggccgatacctcatcggtatcgatgaggtaaagcggcgagccaaactcgtccaacagggattcggcggtgcggccatgaaatgcaatggcaccattggcatccacggccgtggcggccggccaaattggagaaataggcataatcacatcttttcgggggcggtaacgccgaggaggtcaagaccgttggcgatgacctgctggacggcatcgttgagcttcaggcgggcggcggcgcgggccggctccgggttcttggctatttccagggccttgcgggcctcgtcgtcaccacgggtttccggatcggtcagggccatcggcaccacacgctccacgttgtaccacttgtggtaggtggcggccagctcttcgaggtagcgggccaccttgtgcggctggcggtcgtcggccgcggtggcgagcacgctcgggaactgggcgagggcggcgagcacttcgccatcggcctcggtgtccagcagggacaggtcggcgccctcgtagctgatgccggcggctgccgcgttgcggtccacgttcttggagcgggcgtgcgcgtactgcacgtagtacaccgggttgtcgttggtgtgcgaggcgagcagagccaagtcgatgtcgaagttctggttgtagtcggatcgggccagcgagtagcgggcggcgtccacgccgaccacggagaccaggtcgtcgatggtcacgacgttgccggcgcgcttggacatgcgtacgggcttgccgtccttcatcacgttgaccagctggccgatgagaatctgcatgttcttgccgggttcgtcgccgaaggccgcgcacatggccatcatgcggccgatatagccgtggtggtcggcgccgagcatatagattgccacgtcggccgggttttcggcgcggtggcgcttgtcccagtagtaggcgatgtcggcggcgaagtaggcgaactcgccgttggacttgatgatcacgcggtccttgtcgtcaccatgcttggtggattcgaaccaagtggcgccgtccttgtcgtagatatcgccgtgagatttgagctcttcgatggcggcttcgaccttcttgtcggcgtagaggctgttctcgtggaaccagacgtcgaagttcacgcggaagtccttcatggacttctgaatctcgtcgaacatcatcggcactgcgcgcttgcggaactcctcgcgcacttcggtgtcgtcctcgccgagcggttcaccgtcatcgttcaggccctgatcctggtgggccaacgcggtcaggttcacgccgtcggccttggcttcggcttcgacgcgggcggcgatctcgttgatataggcgcccttgtagccgtcgcacggggtttcggtctggtaaccggcgccgccaagcttgttggcctcggcccaggcggcgaccagtgacttggcgaagcggttgatctgctcgccgtggtcgttgaagtagtattcgcgcaccaccttggcaccgttggcctccagcacacgggccatggcgtcgcccaccgcggcccaacgggtgccgccgatgtgaatcggaccagtggggttggcggaaacgaactcgaggttcagggtctggccgcccagatgggcgttgcggccgtactcgttgaccttgttcaggtgcttgtcgccatcgaccgcaggggccgcggcaagcacagtgtccaccacggcggcggccgaggcggaatcaagggtgatgttgatgaagccggggccggcaacctcgaccttggcgatgccgtcggcttcggccagtgcggcggcgaacggctcggccagatcgcgcggcttcatgccggccttcttggccagctgcatggcgatattggaggcccaatcgccgtgcgcgcggtccttcgggcgcatgacggcgagcttgtcgatgggcgggatcagctcgtcggtcagttctccggcttggccggctgcgacgaggttatgggcaatgttggaaatcagttcacttaaggcttcagggctcattcttctaaggataccgagaacggcgacacttgcggtccggtatgcctatagatcgcccccgcaatgttccgaaacataccaagcgaaaatcggccaccagcaatcccccgaaaacgttgggggctcgccggaaccgctatacataccgtcagtcggtatctatagtgatcggcaacgccgcataccgcataccgcagggaggccagcatggcacgtaacgcgcaccccgaggtgacgcgcaatcgcattctcgacgccgcgcaacagctgttcataaccaaaggctacgagcacacctccatccagaacatcgtggacgaactcggcgacctttccaaaggcgcgatctaccatcatttcaaatccaaggaagacatcctcgaagagctcatcaaccgggacaacgacgtgcaggacgacttcaacgaatcggtgatgggccgcagcgacctcaccgctctcgaaaagttccgcatattgtggcactattcgataaccgcacaggaccatgtgcagatcatgcgcgccgccatgcccatgctgagcgacccggtttcgttcgccgcaaacatgcggatctggagcaagcacctgcccgaacggttcctgccgctgattgaagagggcgtcaaggacggctccatccccaccgcatatccgcgagaggccgccgagctgctctcgctcctgcccaactactggctgatgccgtatttctatccggcgagtttgtccgagatggagcaccgcgtacggtgtctggcagccatgctcagcgcgattggcgtgccgattttcgacgacgaacttatcgaaatgaccgccaaaggcatgatgacgttcgacagactcccctcagccgcctgcggcgacagctcccctcagagaggggagccaaggaaaggctcacaatgaacacagcaatacaacgcaagaacgacaacagcccccagcgcccgccgcgttcccgcgacttcgtgctgttggtcgccggccagggtatttcgctgttcggcaatatgatgctgcgtttcgccatgtcgatgtgggtgctggacgaaaccggctcggccaccatcttcgcctcgattctggccgtatccatcgtgcccaccatcctgctctccccgttcggcggtgtgctggccgaccgcgtcaaccgccgcacgatcatggtggcactcgacgccatctccgccacgctcgtgctggcgagcgccatcgttttcgccaccgcgggcttcaatatcgcggccatcgccaccatgcaggtgctgctcgccgtactcggcgcgttcgagacgccgaccgtacaggccgcgctcccccagatgttccggcagtacggccctgccactatgcgccaaggcatggctgtgatcaatcaggttcagcagttgagctccctgctgccaagcttcctcggcggcgtgctatatgccatgttcggcattcgcctcatgatgatcatcaccatcgtgagctttgccggcgcggccgcgctcgaatgctttatccgtctcagcgcacctgaccgcggagacgaagaacttccgacaccaatcgaagacctcaaagccggcatacgattccttgtgaaagaccgtcccaacgtgttcaaactgttgttgttctcagccgcactgaacttcgttctcatcggatactccggcgtcggtttcccctacacgattcgcaccgtgctgggcttcaatgccaccgtgtatggcatcgccgacggtctgattggcgtttccggagtagcaggcgccttcatcgccggcctgttcgccgcaaaactcaccatgcgctggttgccaggattgatggccgcactcgcgttagccatggttccacagggcatagtattcctgctgccggtcggcgcatggaccaagctcatgatactcatcatcttcacttgtggcacaatgattgccagctgtttcactaacctcatcgccgtgcccaccatccaactcaatactcctgaagcgatgaccggcaaagtgatgtccatggccgcggctgtgagcatgtgcgcccagccgctcggccagatggtgtacggatgggcctatgaccggatgccggtagcagcagtgttgttcatctccaccgtattgttcggaataatcacggcgatgctcgtgccgctgtccaaacaattcgaggactaaacggctcaatacagtcctggcttctctcaatgagagaagccaggaagatcagtcgaagtcggcgccgagcgcctcgagcttgccacggaagtcggcatagccacggtcaatcaacgagatgccatgcacatcggacggaccggatgcagccagcgcagcaatcagatgcgagaagccaccgcgcagatccggcacgtcaatatcgcggccggtcagcggggtcggaccgaaaatcacagcggaatgcttgtagttacgctgctggaaacggcagggcagggagcccaggcattcgcgatagagctgaatggtggcacccatctcgaccagtggcttggtgaagccgaaacggttctcgtacacggtctcgtgcacaatcgacagaccattcgcctgagtcaaagccaccacgagcggctgctgccaatcggtcataaagccggggtgcacgtcggtttcgatggccacgggcttcaagtcaccgcccggatgccagaaacgaatgcccttatcggtcacctcaaatttgccgcccaccttgcggaacacgttgaggaaggtaatcatctccggctgggtggcacccttgacgaagatgtcgccgcgcgtggcaagcgccgcagacgcccaagaggcagcttcaatacgatcggtcagcgaagtgtgcgtgtagccttgcagctccttgacaccttcaatacggaacgtgcgatccacatccacggaaatgatggcgcccatcttctgcagcacgcagaccaagtccataatttccggctcagtggcggcaccagagagctcagtcttgccttccgcgagcacagcggccagcaaagtctgctcagtggcacctacagacgggtacggcaggtgaatcttcgcaccatgcagaccattcggcgcagtgatgtgaatgccgtccttatgttccttatccacggtggcgccgagcttgcgcagggtctccaagtggaagtcaataggacggccgccgattgcgcagccgccgagggccgggatgaacgcctcacccagacggtgcaccagcgggccagagaacagaatcggaatgcgggaggagccggacagcgtatccacgtcggccacgtcggccagctgtacatggctggcgtcgatggtcacgatgcccttctcgccgttcacgtccacatccacgccgtgcagtcgcagcaaatcggagaccacatgcacatcgcgaatctccggcacattcttcagcaccgacttgcccggcgccagcagtgcggcgaccatagccttgctcacgaagttctttgcgccacgcaccttgatcgtgccattcagcggcttaccgccctcgacatgcagcacgtcatccggattctcagccacgccactctcctatatacaagcaattcaaaaaacgctatcgtccagtttgccataacccatgtgctgactccgtgaaatgcgcctgaagccgaactccggcttggcataaccgactctttcatacccccttttgcacccccttctaataccccctttcgactgcaggacgaaatcttccgttttccgataaacgtgatcttcctcacagctgagcccacggtgttcctcatgcttctacgctacgattcagggcaatggcacctgacgccatggccacaagcaaaggagcattcatgaccacagtcgccgttatcggctgtacgcacgccggcacgttcgccaccacttcgattctcgccgagcatcccgattggaccgtccacgtttttgagcgcaacggcacgctctccttcctctcctgcggtatcgccctgtgggtgggcgaccacgtgtccgacccgaagaagatgttctactcctctcccgccgccttggccgaggccggtgcaaccatgcacatgcgtaccgatgtgaccgacgtgaatcttgacaccaagaccatcacctaccgctctctggaagacggtgatgacgctcccgagcaaaccctcgctttcgataaactggtcgtaaccaccggctcccgccccgtaatcccgccgattcccggcatcgatagcccgcacgtactgttgtgcaagaactgggatcacgccatcgccatcaaggagaaggccaagaccgccaagtccgcggtggtcatcggttcgggctacatcggcgcggagatcgccgagcagttcagcgtcaccggcgtcaagaccacgctggtggacgggctcgaccgcccgctagccaataatttcgacaagaccatcaccgatcaggtggcggcggcgttcgaagagcacggcgtaacgctcgcgctcggccagaaagtggtggaattccacgacaacgacgacaatacggtcaccgtggtcaccgaaaagggcgaatacactgccgagatggcaatcctggcggtcggcttcctgccgaacaccggcctgctcaagggcaaggtggacatgctgccaaacggcgcgatcgtggtggacgactacatgcaggcttccgtgccggacgtgtatgccgccggtgactccgccaccgtgttctacaacccgaccggccagcacgattacattccgctggccaccaacgcggtgcgccagggcctgctagtcggccgcaacatcgaggcgccgaccgtgaaatacctgggtacgcaggccacgtccgccgtgcaattgtatgatctctcgctcgccgcctccggcctgacccgtgcgggtgccgaacgccgcgggctcacggtccacgagacctcgctcaccgaggattaccgcccggacttcatgctcaccaccacgccggtcacgtcgatcctgacctgggatccggaaacccgtaaggtcaagggcggccagttctgttccaaggccgatatttccggcgcggcgaacgtgatctccatggccattcaggccggcttcaccatcgaccagctggccaacgtggacttcctgttccagcccaacttcgacaagccggtctactacgtcggcgccgttgccatgaaggcggcggctgagtaaaatccatcgatctgcctgcatcttgcacgatacgtgagctgtcggcagcgaaagcgtccgtaagcatgcgagggtctcgtcgagccgcatacttacggacgttcgttctcttgccgcagcttccgtccaccgtttcagtcaaatgtgcaacataactacctgttatgtacattaggtattgatttccaattacaactcgactatcatggaactttcgccattttttgcgtatcagtatcccttggtttcattgacgttgagacatcgttatcaataatctctataagcaatagtgataaacggctcctttccagcgtttcaccgctatacactattgcccgttgctgcaatagataccaccgcactttgcatacggtgaggtcctgcactgacacgtaacactggagaacatggttagatagagaggggccacctccaaatgaactcatactcactgaaaaagacggcggtaaaagctcttgcggccgtcgtcgcgctgagcactctgaccggtttggccgcctgcggttccgcgcaagccgctgatagcggtgaaaaaacactgaaagtcgcactggtcgtgccgaacaaaccgtatgcatacgccgaaaaagacggtagccccgcaggctttgaatacgaagttctgaagaaaatcgacgatcagaacaagaacatcaagctcgagtactcgactcttgaataccagaatgcacttattggcctcaaggaaggcaagtacgatctggtcagcggcaccttcttccgcacgccggctcgtgagaaggactacctggtcaccaagccgtacaactactacttcctgaacctcattgtgaacccgaacagcaaaatcaagaccatggaagacctcaacggcaagtccgtggtgccgatcgagtccaccgatggccgttacgttgctttccgcgattggcagaagaagcacccgaacgtcaagatcaagatggaggcttcctccacccagccgaccttcaccgacatgatccagcaggtgcacgacggtacatatgacgccgtttacctgtccaaggaccagttcgatggcgtcaaggacagcctcggatacccgatgaaggtcaccgacgccgtcgacggccgcgacaccgtcttcctgctcaacaagaagaaccaggacgcgcagcagcaggtgaacaagtccatcgaggccctcaccaaggacggcaccttggccggtctgaccaagaagtggttcaagcaggataacttcgcccttgccgagaagctcggcattgccgacaacggctgatctcagttgtatttcgcttgagattcgctgaataactatacgaggggccatatggattccggattgcaaatcatagtgaatgtattgccaggcatgcttcaatacgttccgatgacgttggtgtacacgctggcgcccagcatcattgccgcgattttggcagtgttcatctgccaagcacggctgcgtggcactggcgtcgcgtactggctggtatcgctgttcgtgtcctttttccgaggcactccccagctggtacagatgtttctgattctgtatggccttcctcgactgctcctcatcattggcattgatatcaatgattggtcggcaggtacgttctacatcatcgccaccacactgaacctgtcatgctttgtggctgaagcgtatcgtggcggatatctcgctatggattaccgccagatcgaagctggctacagcattggtttcagccgtctgcaatgcttcttccatgtcattgtgccgggaacgctgcagaatgctgtactcaatttgaagaatctttccattgatgtcctgaaaggcgcctcactggcctacactatcggcgcaattgaagtcatgggctatgcggatcgcatgattggcttgaattccggcgtaggcaggctgtgggtgctcggcgtcgccgcagttatctatttcgtactggttgcgattctcgagttgctattcaatctggctgcaaagcactaccagcgttacgggaaggcgtgagactatgactttggattacgaattcatggggcaggatattccggtcctgctgcgcgcactgcccgctactatcacacttaccttatggtcgatgcttgtggcgttgctgttcgccgtcgcctgcggcgcctttattctggtacgcatccccgtactcaagcaactggtcatcgtcatcaatacgtttatcaagggcgtgccgctggtcattcagctgctgttctgctactacgcggtgcccatcgtggccaaaggtctcgacggattcctcggctatcatttcgacccgcgcaacccgccgtatttcccggccgcggtactggcactgggattgaacttcggcgcatacattaccgacgtagtggtttcctcggttcgtgccattgaccacgggcagattgaagcgggcaaggcatgcggcatgcgccgtcgagaaatcatctggcatattctgctgccgcaggtagttgtggtgtctatccccgatatgggcaattactttatatggctgctcaagggcaccagcgttgcctctctggtcggcgttgccgagcttttgggcacggcgaaaatcagcgccagccagaattacgatttccttgaagcgtacttggttgccgcactgctctactgggtggtatgcgtggttgccgaatggttgctgaacctgctgtacgccaaactcggcaaattcaatatcaaggaagatgatgccatgcaacagttctcgttcttcttcttaagcaagcaggcgaaatccaagttgcgcagaaaggtatctgtcatcgcctgatgacagatacgcagtagcatcgcatcgaacaataatttcaagcagtacaagtagttcaagcagttacacatcctagggaaggaaatctcatggcattcgaaaacaatgttccgagcatcgtcaacccggtggtggacggccttcgcgacatttccgctcgtcgcgccgcaaccatcagcaacatgattgacgaggccgccaagcacggcctggacgatcagttcgcctatgacgccgtatggacgtacggtgccgacaacggtaaggaattctcccagcaacttggcgagcatccgaccttccgccagttcgcagatgatttcggccgcgatcacaacgagcagatctatgagatggagcgtgtggtcgacaacgacgacgagctggagattcatttccactactgcccgtacgtcaccgaatgggtaaagcagagcaagaatcctgagcagattgcccgtttgtgcgacgttgccatggccggagaccatgcttttgcgcaggaattctcctgcctggatttcacgcttgaaggcacaatcgccaagggcgaccccgtgtgcaccttgcgcttcgttcgccgcaaggaccacgaactggccaaagacggccaaggctttatcaaaaccaagaaggctgcctaagcgtggcgcaatcccgtaattaggcgctaatacataggatcaaaaaggaacgtcatggaatacgccatcagcgtcgaagacctacataaatccttcggcgacaaggaaatcctgaaaggcatttccttgcatgccgccaaaggtgaggtaaccgccattattggccccagcgggtcaggcaagaccaccttgctacgcagcatgaacctactggagaccccggattcgggtgtcattaccatcggtggagtcagtgttgattgcggcaagaaaatcaaacatgccgatgcactggcacttcgccgtcaaaccgccatggtgttccaggactacaacctgttcaagaacaagaccgcgttgcagaacatcacgcaaggtctacgcacggtaaagaagaagtccaaggccgaggctgacgaaatcgcccgcaaacaactggaattggtcggcttgtctgatttcgccgactattaccccattcagctttccggtggtcagcagcagcgtgtttccatcgcacgagcactggctttgaacccgaccgcgatcctgttcgatgaaccgacttccgcgcttgatccggaattggtgggcgatgtgctagaagcgattggcacagtggccaagctgggcatcactatggtgattgtgacgcacgagattcgttttgcgcgtaaggttgccgacaaggtgatttttgtgaaccaaggcgtcatcgtggaagagggcactgccgaagaggttatcgaccacccgacccacgaacgcaccaaggcattcctgagccgcatcaacgacaagtaatcggcgtccggccaacgtgaaaacgggtgtggcctgtacgtgtacatgcattacgaacaatgccatgcgcatacagaccacacccgttttcacgtgttcagcagaccgtaacgccttgccgttatttgatactggacttaatcttgcgggccagttcggcatcccacatcgcgccggtggcggacatcaccgagtccgcaccggcgtttctgtatgcctgataatcggcgggcgcaaccacgccgcctacaccgttgatcttgaaatcaagaccgagcttctcgcgaatcgcggccagacgagccaccatgtcgagtccagcgccgcgaatcgcgttgccacacacgcctgaacggtcgcggcccgcgccgggcaaagcctgattgccgtccgcgtcgaccagtttggcggaaatcgtgttgatggtgctgaagccctgcacggtgccgtggcccacggtggagcgcaccatgagttccaggtcatcatcactgggaatgtaggcgagcttgaccatcagtggaatgtcaccgatttcattcttcaccgcttcggtaatgcgacccacgagcagcgggttgtggcacagcagtcgattgtggccttcgttggggcagctggtgttcattaccatgaactttgcgccggtttccttgatcagccgggcggtggtggcgtggtcggcgatgtattcttcctcgctcatgccttccacgcgcgagccttggaaacttggcaccagcacttggccgagaccggcggcggcgatggccgcgcgcatatccggctgccagacgtccgggctttgcgagggtacaccgaagctgttggagatggagatcggctgctcatagtcggtgtcggcgagtacgccctcgtccagttctgcgctgcccggggtcagcgagccgtccgccgacttgggatgcacggcgagcacgttcgggaacggattgcagccccatgcccgcgagcgcacggttttgtaggtagccagatcgaagcccatgcggaacgcggccgtagtgaaccggctgttgagcagcggccccgccggaatgccaaacggcaagttcaccggctggcccaggaaggtgcttcccgctggctccccctctgcgccgacggcggtcttttcttctggcttctcctccgcaccggctgacgtctttttccctggctccccctcatagggggagctgtcaccggaggtgactgagggggtcgccttcagcgcctcggcgaacgccccaaacggcccttgctcatagttatcttcatagctatgcttcacatcgtaaaacggctcaaaatcactcatagttcaacgataagccacgcccggccatcacacgcacaaatagcgcgcttacccctgcacgcctatacccagcacaatgaacaccgcaaaccacaacggttgcatgcgcccaccaccgtactggctgatacggccgagctgattgggctcaccatagctgtcgacgtgtgggccgccgagccaaacgtcaccagggacccaagcatcaacaggttcagcaccaacgttgccgcaaacacaattagcgaatactgcggcagtgtgatctcaaccggagctgcagcgctggagccgattgcatcgtccttggttatatcgttcagcgcgtcaatcgcaccccgaataatgctgccacccaccgatgctgattgcagcatcgcgaatccgagagcgtccagtacggaataagccagtggtacagcgaccgcgacgcgtttggtaaacacgtaaccggctgccaaaaacaccgttaccaacgcagtgccaccagtaatccaccaaccttgcagaggcagcagagccgcggccagacaagctgcaaccccagccgcgccggttctcatcatgcacgcggcgaactgataacgaaagattcggaatccacagcaccagctcaacaacaatcgcggcattgtccatgagattgctcaggggcgaatcgatgatatccgagccgttgccgaacgaatagcctatcaatgagccgatgccgccggagatgatgccgactgcagccgtcaacagtatcgtgaacaaatgcacccaccagtattcaccgcgtgaggcacggccgtgaaagatgaacgtcttgcggaagaatcgcacgattagttacggcgcaatccatgccatcaacagcacttcgccgttatatctgcaaccattcggcgtagtgcagctcaccgtttcagcggctggtgcggacacggacatccggctggacgcggtacccggtaccttgcagctggagccggagcggtgccgtgaaacatctcgtgaaacactgcgtggaacatctcgtgaaacaatcaatctccagtgccctgacgcatccacgcaacaggaatccgcacttgagcaacctacaagccaaagccgacgccggcctccgatacaacaactgctttggaggcacaagacagctccgaaacgtacgcatctgagacgaacgcagccgctaacgtttatatcgcgccgcttccccaccgcatcaccgtcacgggagccaatggactggcacagttcgtactcatcacccgccgcacccgggtacagtcggtcacccgctcgaccaccctgcggcgtgagccgcacggcatcgaacgcatcaccatgcccctgttcgtcaccaacggtctcgacaccctccgctttctcttcctacaccgcgcagacgccgatatcctgagccgttgggcggacggtccgaccgaagtatgaatttcaaaggtctcactggtgagcagccagtgagaccttgtttatgcgatggagagagttagataatgccgcggtcggccaacgggcccgtccaattatcttcaggctcgcgggcggactcgattttttcttcgggccagtgcttggcggggatggtcttgggcttgaaggggaacttttcggcgcgcatcttttcataggcggcgatgtcgtcctcatgctggagcgtcaggtcgatatcgtcgtaaccgttcatcaagcgccaacgcacgtagtcgttgacctcgaacggcagagtcacgtcgccgcaggtgacagtgcgggtctccaaagacacggtcatctcgcggccgggttcttcctccagcagcttccacaggagctcaacagactcctgcggcatgatcgcggccagcacaccgttcttggcggtgttgccgtagaagatgtcggcgaagctgggggcgatgaccacgcggaagccgtaatcgtgcagcgcccacacggcgtgctcgcgggaggagccaatgccgaattcggggccggctaccagaatctggcccttgccggcgtactccggcttgttgagcacgaagttcgggtcgcggcgccatgcgtagaacagggcgtcgtcgaagccggacttggtcacgcgcttcagaaacacggcgggaatgatctggtcggtatcgacgttggagcggcgcagcggcacgcccacgccggtcagggtggtgagtttttccatggatatcaagctttcagttcttgcccccactggcgggggctgtcagctttgctgactaggggtggtcgccggcatacagcgtctcaagaccaccctcagtcagtcttcgactgacagtccctgccagcgggagccagtgtgcagtatttacaaatcggcgggggacgaaatcgtgccgcgaatagcagtcgctgcggccacggcaggcgacgccagatgcgtacgcgaccccttgccctggcggccttcgaagttacggttcgaagtggaaatcgagcgttcgttcggcaccagcttgtccgggttcatgcccaggcacatcgagcagccggcgttacgccattccgcaccgaagtccttgaacaccttgtcaagcccttccttttccgcctgcagacgcacgcgggaggaggccggcaccacgagcacgcggtgaatgttctccgccttgtgatgtcccttcataatcgcagcggcctgacgcagatcatcgatacgaccattggtgcacgaaccgatgaacaccgtgtccacggcgatgtccttgatcggcatgcccggcttcagacccatgtacgtaatcgcgcgttcggcggcggcacgcttggtggcgtcggcgatcttgtccggttccggcacgttcgcggtgatcggcagaccctgaccggggttggtgccccaagtcacgaacgggccgagcttggtggcgtcgatatccactaccttgtcgaacatggcatcgtcatcggtcttcaacgtcttccaatactcgaccgcacgatcccacatctcaccttccggcgcatgcggacggcccttcaggtactcgaatgtggtctcatcgggcgcaatcatgccggctcgcgcaccggcctcaatggacatattgcatacggtcatgcgctcatccatggtcaggttgcgaatcgcctcgccacggtattcgatgacgtggccctggccgccgccggtgccgatcttggcgataatcgccagaatgatgtccttggcggtagcatccgcaggcagcttgccgttgacgttgacggccatggtcttgaacggcttcagagacagcgtctgcgtggccatgacgtgctcgacctcggaagtaccgatgccgaatgccagcgcaccgaatgcgccgtgcgtcgaagtgtgcgagtcaccgcacacgatggtcatgcccggctgggtcaggcccagaatcggcgcgaatgcatggactatgccctgatcggcgtcacccaacgggtgcagtcgcacaccgaattccttgcagttcttctccaaagtgctcagctgcagagcgctcgtttcatccggattcggacgatcgatgtcaacagtaggagtgttgtgatcttcggtggcgatgagctgatccacgtgacgcggcttgcggccagccagacgcagaccctcaaatgcctgcgggctggtgacctcatgcataagcatcaggtcgatgtacagcaggtcgggcgcaccgtcgctgcccctgcgcaccagatgatcggcccagaccttctcggccagtgtcgttcccatagcgtttcctccaaaaattccgcgcgaggtattgtgttcgcgccttgttcgtggtattagcctatgtggtgacgtttggcccggccacaagcaggccggatattgagatacgccccccaattcccccatggccactctgtgagacacttccccgatttggtatttcactatgtgagatggcataatcgcacgtattatgactgattcccaagaagaaccactgaacaacggtctgaccgactctgagccagccgagaccaccaacgagaccgtcgcaaaggatgacggggaaatccattccggcgtcggcgttctcgataaaaccgtaaagattcttgatgcgcttgaatccggcccgtctacgctcggccaactcgtggccgctactggactggcgcgaccgaccgctcaccgtctggcgatcgccctggagcgccatcgttttgtgctgcgtgatcagcacggccgctttgtgctcggctcccgttttgccgaactggccgccgccgccggcgaggatcgattgctcactgccgctggcccgattctgcagaccctgctcgaccgcaccggcgaatccgcgcaaatctaccgccgccagggcgaccagcgtgtctgcatcgccgccatcgagcgcgcctccggcttgcgtgactccatccccgtgggcgccatgctttcgatggaagcaggctccgccgctcagattctgctggcctgggaggattctgaccgcctgcaccagggactgcgccacgccaagttcaccgccaccaagctggccgcagtgcgcaagcgcggttggtctgagtccgtgaacgaacgcgaagagggcgtgtgctcgatttccgcgccgattcgcaacgcttccggccaggtcatcgccgcgatttcgatttctggcccgaccggccgcatgggtgccgcccccggccgccgttacgcgccgctggtcatggctgccggcaagtacctcaccgaggctttggtcaaagcagttcgctagtcatcacatacattgcccccgccggcgggggctgtccggcatggccggactgggagtggtcagcatcaccgctcaaaccacccccagtcgactccgtcgacagccccgccagcgggggcagttttgttatgcgctacccaaacaggccggacagctggctccacagcgacggcttacgcagcaaatcatcgccctcgccctcgcccggagcggcctggttcactgcatacgtgtaggcgcgtttggaactgggtttacccaccaattcgccgaattccagcaattgcgtgcgtggatcatagggatggcgaatatcgaattcaatcagccgtgtggcacgcttggccggcgccgggccgtatgtattgaaaccacaggtaggcgtggccatcaatagcagcccctcatattcacctacgaatccgttgcgatggtcatggcccgccgccacaccgatatacccctcgcgcagcgcctcaaactcgtccgactcatccgggcaggagatgccctcccccagatacccgccggcttgggtgcaatcctcgtccaatacatagtaggtatccgcgtgctcgcgatagccctgcatggcgaaagccgcgttggcagccaccggtctgagcacctgataatactccggcagcggcatgtgctggaacaccattgatttggccccgatgcgctcaggcaaggccttgaggaaagccaaggtctctggcgaaggtgagccgaagccgcctccatgcgcataatcaccggagtttaccagcaccaggccaagtacgttgcgcgtgcagtccacatccatcaccggcaatgcgaaggtgccgggagcagcagacgggtacatcgcggcggaaccactcgccgaggcatcagccgacccatcagcgtcttcgccattgagcgtctcaggcgagccgtcttcgcgacacatatatatggtctgcttggccagcgcatcgctcggcggattgatgcatccggggaactctcggtagatctcatcaagctcggcatcgctcagaccgcactggaaatcatggttgccataggtcaccgcccacgggatgccccgcgttgccaagggagcggtgaattggccgatggccttgcgcaccaattcgcgcgtgtggctcaatgcagactcaggaatcgcctcttcgcaccaacggcgtttgcggaagctcttggcaaaagccggatcatagccggcaatctggttgccggagaaaatcactatatcggggcgagtggcatcaagactggcttcgatcagagacaccgtatctttggataccttggcaccgtcttggatatcggcaatctgcagcacgcgaaacttaccggaatgatggaattgcagacgccccaaacgcgcggaaatggaaaccgggcgatggtcccccacctcggccggcttgattctgggcttggagagcaagccctctggcgcacgctgtgtttccgtcatgacctccactgtacacacaaacgaaaaggcccgccggagcgggccttttctacaagtccaactactggagcagaatctctgcacaacatcatcgttgcaacggtaagtctttccaatgcccgtccaacgtaacagtcctcgtgaccatacactatttgtgggctctgctctgttcagttgttcttgtacctcataatctattcacgcctgccgcttcctgcaagttgaagacggcagttgtgctgtttttatcacaagtgttcaattgaactaagaaaatccggaaaaacgaatcaaaacgttcgtttcaaacccgcccgatgtttgattgtgttctgttcgctgcagtttacggcgtgtcgcaacggccaccaaccccactaccacatgttcaattgaacatgactcattcacataaacgaacatccgacaggagctccccaccgactccccgcaaaccaacgtgaacacccgctgaattttggcgagttcagtagctttccggccactccagagcttacgatgtaagttatggcacagatatttgacgcaccctcgaaggcaatcctgcgcagtcagatcgcagagcatattgccgagaacgacaacaacgaccgccgcgtcgaccaggaaggcgagacaccgctgcccaaggaccgcttcttcgaccgcgagctcagctggctgaagttcaaccaacgcgtgctcgaatgcgcggagaacgaagacatgcccctgctcgagcgcgccaacttcgccgcgatcttcgcctcgaaccttgacgagttcttcatggtgcgcgtcgccggcctgaagcgccgtatcgactcgggcatcgccgtgccgtccgcagccggcctgagcccgcgccagcagctgcgcgccatcagcgaaaccgcgcatcgtctgcagaatgagcacgcacattacgcgattgacacgattctgcccgagctggaaaaagagcacatcgtgctgctcacgtgggacaagctcacctccgccgagcaggagcgactctcgcgctactaccgccagcaggtgttcccggtcctgacaccgctcgccgtggacccggcccacccgttcccctacatttccggcggttccatcaacctcgccgtgatcgtggagaacccggcatccggcaaatcgcacttcgcccgcgtcaagatcccgggcaacctgccgcgactggtgcccgtggacgacatgaccgacgaggaatccaaggacgagcgctatggcttcatcgccatggaaaagctcatcgccgcacatctggaatccctgttccccggcatgatcatcaaggaagcccgatccttccgcgtgacccgtaacgaagacatcgacgtggaagaggacgatgccgagaacctcctcaacgccatggagaaggagctgctgcgtcgccgcttcggaccgccgattcgtctggaaatcacagacaccaccagcccgttcctttcccagctgctcgcggaccagctcggtgtgagccaggacgaggtgtaccgtctgcccagcccgctggatctcacagtgctcttcgaactcggcggcgtggatcgccccgacctgaagaaccgcccgttcgtgccgaccacgaaccgccaaatcgccgaggtcgagtcctcccgtgcgcaggacatcttcgcggccatccgcgagcgcgacatcctgctgcatcacccctatgactccttctccacctccgtgcaggccttccttgcgcaggccgccgcggatccgaaggtgctggccatcaagcagaccctgtaccgcaccagctccaactcgccgatcatcgacgctctgattgacgccgcccatgccggcaagcaggtgctggctctggtggagatcaaggcccgcttcgacgaggacgccaacatcgcctgggctcgcaaactcgaacgcgccggcgtgcatgtggtgtacggcatcgtgggccttaagacccactgcaagctcatcgaggtcgtgcgtcaggaagccgacggtctgcgccgctactgccacgtgggcaccggcaactacaatccgaagaccgcgcgactctacaccgatttgggcctgctgacctgcgatccggtggtcggccaggatctgacccgactgttcaaccagctctccggttacgcgccgaagtccagcttccaccgtctgctggtggccccgcgcaccgtgcgcaccggcctgattcagcgcatccgccgcgaagaggacgccgcacgcgccggtaaggaagcgtggatcaagatcaaggtcaactccatcgtggatgagaagaccatcgacgccttgtaccgtgcctcgcaggccggtgtgaagatcgacatcgtagagcgcggcatctgcgccctgaagcccggcgttcccggcctgtccgagaatattcgcgtgcgttcgattcttggccgcttcctggagcactcccgcatctacgctttctgcaatgcggacggcccgcagatcggtgaaggcccggcttccggccctgaggtctacattggctcggccgacctcatgcaccgcaaccttgaccggcgcgttgaggctctggtgcgtgtcaccgctcctgagcagattgacgagctcattcgctacgtggacctgcagatggctgattccaccatgagctggcatatgcagcctgacggcacgtatgtgctacacaccaaggacgacgagggtcgtccgctggtcgatagtcaggaatacctgattcgcaagcaccagcgccgccctagctcgcataactgattccactcgatgctcccgttggcgaaagctgactgagggtggttaatgatgcccggctcctcttgtatgaggttgccgggcatcgtcgttcagagaacaaaactacgtagcggcagtcgattgccctacaatacaagggatgggtacgaacagcatgagacgaatcgtggaggccgccggcggcatcctctaccgatggaaagacaacgtggagcccgagcaggcatcgtctccgtcagcgaatgccaacatcgccaccgatggcacgatcatcacgaacgccgcgcatgccacgaatacggcagacgacgctacgtcatcctccggcgcatcagacgcagccccctcctcaacaggggccgacactcccctgaccggcataatcggacaagcgacgcacgtcgattcggccggctcttcagccaaggatgcgaacgacccagcttccgccgacaatgtgctcaatcacatcgaactctgcgtggtgcatcgcccgaagtacgacgactggagctggccgaaaggcaaagtcgatccgaacgaatctcaccgtcatgccgcggttcgcgaaatcggcgaggaatccggcctgcctgtgcagcttggcccctatcttggcgatatcgaatatccactgtccgaggaaggcagcaaacggcgccataccaaggatcgcacggtggacactaagcacgtccagttctggatggccacgccaatcagtgcgattgacaacctgcgccgcactcacgcgttcggcccggtgcatcgggcggatatcggcgaaatcgatgaggttgtttggctcaccccggctgaggcacgcaagaaactcagccattccaccgataaggacatcctcgcgctgttcgttgaccgggtgcaggagggggcgctggatgccgtgccggtgattattgtgcgccacggcaaggccgaggcccgcaagctgtggaaaggttcggacgccaaccgaccgattacgccgaaaggtgcgtctgccgcgtatgcgctgaaccgtgagctcgcctgtttcaatccgacccgcctggccacctcgccgtgggtgcgctgccaggagacgctggaaatgttcgcctggcagaccgggcgcgacatggttcatctcgacccgctcaccgaagacgcctttgccgctgaccccgatgtcgcatgggaatgtctgctcagtgagattgattttgcgctgaagcgtcgtcagcccacagcgatatgtatgcaccggccggtgattggcggtatgtttgaacatctgcgcaagatgtgcgcttcgacggctttgagcaaacgcctgattgccaagacaccgttcatgccgaccggtacggcggtggcgttgttcgtggtgccgaaaaccccaatcgccgcggacagcaccggcaacgaagacggccctgacggtgccggcactggagttccagctccggccgagcccgagcagaccggttcggccggccacagcagctcttccggccacttggacgatgccgatcagccgcttggcgccgacgtgaccatcatcgatattcagaaagtgcagccacttgtctactagaccagcattccccgattcctccaactcctcggccgcggccgctgcggcccatgccgcgcataacggcggggcgggctctctgggccccggctttggttccctgcgtgcggcgggtgcggcattcagccctgctcgcatcggttccgggcgtccggcccgtccggcccaactcgatccggccgtggccgatggattggccggcgggttggatccgcaggccatcagcgaaatgagccacctgtctgcggcggcgctgctgaatcgggtgcggcacagcgaggatcctgaagtggttcagcgcgtgctgacactggtggagacggtcggcgtggacgagatcgccgaactgtggagcgacgccgaaccggattcgctgcccggcgtgctgtggcgcctatacatgctgcgcacctggatgcgggcgaaccgcgattcaatcgcgcgactgtggcgcctgggcgaaccagtggccaccaccgcctccgctatcgccggcgtggaccagacgcccaccgaggatgacatcgtgcgtttggccgattcgatcctctccggcgcgtttgtgggcgatttcgctgtggcgctggagcgtgcggccgcgtttaccgacgtggtggcattgggcttgcgcgtggagacacggcgcatggtcgagcgagcaacggctaatggcggcattgcttcacccgctgacgagaagaccgcacgcaccaaggcagcacgcctcatgcacacctccgccagcctgctctccaccaccaaggacttccagcacggtgctaacctctggcgccgcggacggctggagtaatagcttgtttatctcccctgatgggccgagccgcaggggaaatgcaggatgcgttgccgggcgagaatgatagtcgagctaatggattggccgaaggctctgattgcaggacgaggtgtccatcagagggggcggcattgctttgcaacgaagccccctctgatgggggagcagtcacgggcgatgcacgtgactgagggagagacccaatccatcacttcaacatcaaccatcagctgacatcggccttccccggcgcgccacggctcatcgcaaactatactgaatatccgcgtcggaccgtgcttaagccccgggctccattttttgccgccgcgagcggcccttgcgccgacaggcgctttcgcggttcggcgcttttcttctttccatcactcgggacactccttcatgcaattgcaacagcatccccatcattctttgcgccatcagcggggcaaaaccgcgattaaacccaagagccaccccgctgagcaaccaaaacgggacagcactgcgattcaatcgcagaaacaccccactgagcacgtctcagcgacgtaaaaccacgagttaaccatgaaatcgctccgctaagcaatctaagcgaggtaaaaccgcgattaaaccgaaagaccaccccactgagcccgtctcagcggggcaaaaccacgaccgagtcaacggttcgccccgctaaggtcggcgcgcaacggcataacctccaatcccgccgaataatgctccatttcagttccgattcagccgcaatcctcgagccaaaggagactcggatggagtcggctccgtagaacagggctccagcccaagcaacaacgacagcaccgatacggaagaggccgccgaccacgcctgcggatggcaagccgcaggatacggagagggactgttctcccccgaatcacctgagtacaattccggaatctggtagtcgaaagcatcggcagcgcgaaccagtccatcagccacgcgcagtgcctcctcctcataaccttctgcacgaagaccattcatcacgatggcactgtcatgggcccacaccgatccgcaatgatagctctcaggccagtacccaccagccagtgtgctcatggtacgcacgccatagccgctgagcatgtcatcgccaaccaaacgggccaccacatcgcgcacaccctgttcatcaagaatgcccgtgccaagcagatgcccaatattgctggtcaaggaatcaaccggcttcttgtctcgatccagcgcaatcgccggatagcggccattgccgtcatcaacccagaaaacctcgttaaaccgggtcttcagccgcttggcccatgcgcgccaatcctcagctccaggacgcccgaatttctccagcacatccgcgccgagtatggccgcctgataggcatatccctgcacctcgcacaaggcgattgggccgtcagcaatgcgcccatcattccagcgcacggagtctcccgagtccttccagccctgattgctcagaccgtggccagtgcgatcgatgtattccaagaatccatcaccatcgcaatcgccccaatcacgcagccaggcaagtgcggcctcaaggttcggcagcaacgcctcaatctcctgctcaggcgcaccccagcgcaaggcctcagcaagcagaataatccacagctcggtggcatcgattgtgccgtagtacagcggaggcaagctggtgccgtcattaaatgcaccggtctgcaccaacggctcagcacgcagttcatgcatgattttgccgggatcagcattggtctgaatatcggattcagtagcttggaagtgcgccagagtacgcagtgcgcccatcgcggtacgagtcgtcagcggcaacatgaaacgtgcagcccatagggaatcacgaccgaacagggtgaagaaccacggtgcaccggccgccaaaaactcatcgtccggcaaagccggaatcgacatccgcaaaccatcgagatccctcaaagaggtattcacccaattggagacacgattatcggcggcctccacctgaacatcggcccacgggcaatcggcattcgccgcgataacggcattgcgcggcgagctcaccgcaatatgcagaccgactgaagtctccgcgcgagcaggaatcgtaacctgccaggagatcacgcaatcaagaccatcaaggatgattgacggcaccccactaccatcctgcggctccgcggttaccgtggcacgcagctcgccgtacgccacctctgcggaacatgcatcaccgggcactcgggagagaataacctcgccgttagctgcggcagaggatgacgcaccacctttgatctcctgcatcgaagccatgtcaaagcgcaatttcactgagaaatcaagcgtcaccggatcagtcatcacgctacgcaacacatatcgctcatgcagggcatccggttccagagtgcggttctccgcgatacgaaccgagggatccgccgtcgggccatcaacattgcgggccaccatggaagacacacccactcctttttggggagagttccatgcgatcgctgtgggtgcctcaccgttcacaaccggaatgatgcgtgagatgatacgagtatctcccacataaaatccggcgatattggccgcccccgcgtgctgctgtgatgcgtccacagtgccgtctgcggtttcccacagttgggcaggcgccacaacaagaggcttcatgtcgtgcatccatggctgtcggatacgctcagtgctgttcatatgttctccgttgattgttgaaaagcgaatagttattgttgcgcagacccgtcattccttgacggagccttccgagctgttcatgatttgcttctggaagatgaagaacagcacggcgacggggatggtcatgatgacggcagccgccagtttgaccgggtattggttaccttgggacagctgcccactggccaacgaggcaacacccttggtcaacgtggtcaacgccgaagactgagtcgaaacaatgaagtgcgacagctcattccacgagccctggaaggacagaatcgagatagtcacgattgccggacgtgccataggcagcacgattgaccagaaaatacggaatgttcccgcacgatcaatcatcgcctgctcctccacagaccgcggaatcgactcaaagaaattcttcatgatgaacacgccggccgcatcgatgagcaacggcagaatcatgcctgcatagctgtcgtagatgccaaggctcttgatgatgaggaacttcggaataagcagcaccaccatcggcacactcatcacggcaagcagcaggctgaagacgacattgcggccacggaagtcaatacgcgcaagtgcatagccggccagggaatcgaagaacacacgacccagcgtgaccacaatggtcacgatgaacgagttcttgaaccataccgggaagtccgagttcaggaacagcttcttataggctgccgtcgtccagatttccggcaccagcgagaccggattggcggtggcatcggcatcggttttgaacgaggtggcaatctgagtgacgaatggcatgatgtagatcactgccaacacaatcagaatgatgtacaggatgatgccactgtggaagaaacgcttgagccatgatgcgctgttatcgccacgcacagtgttggataccttcgacttgctcatatcagattcccctttctgcgctatcttcggcaaccgccgcatcagcggtctgcgccctggcagcagccggccgccctactctcaatgtggcgagttcttcgcggttcaatgcgcgcgcctcggctttcatggcctcgtaatcggtcctgcggcgtcgagacatcttcttgtccttcatcacccagcgctgaatccaggtcatgacgatgatgatgacgaataggatgaaggagatagccgcgcctcgaccccattcctggctgttgaacgctgcggtgtacgacaggtacgcagtggtcagcgtggtctttgccgggccaccctgagtacccgtataaatctgatcgaacacctgccatgtaccgatgatgcccaatgtgacgacggtgaaaatcgtgggcttcaattgcggcacggtcaccttccacatacgctgccacggcgttgcgccgtccatgatcgccgcttcttcagtgccttcgccgatgctctgcagcgcggcaacgaacatcagcataaaagtgcccgaagtggtgaaaataaccatgaggatgatggcgaccatcgccaccgaaggcccggcaagccaatcccatgcgctgacgccaaggaagctgtgttcggccagcgccgccggcccattcttgacacccaaagccgacaacaggatatggatgatgcctcgcggatcgttgaaccagttgggaccgttgacaccgaaccatttgagcatggcgttaatcggaccgaccgcgttgaacaggaacagccacaacacggtgattgccactgagctggtgaccgatgggaaatagaacgccgtgcggaagaagccacgcgccttgaggatcttacggttcagcattaccgcaagtcccagggacagcagcgtctgcagcggcaccacgatcaaggtgtaccaagcattgttgcgcagagccgtgccgaaatcgctttgcgcgagacccggagcggtgagcacatcactgtaattctttagccccacaaaatcgacggacgaaccaaacggcgtgcctcgaccgctccaattcgacacactcacccacagcgccatgatgatgggaataaacatgaacacgccaaggatgatgatcatcggcagaacgaacagccaaccggatatctcctggcctttgtgatcaatgcgctggcgttcgaccttgttcgcacccaacttgcgtggcttcggtgccttttgtgatgaggacatgctccgactcctttgttgataatgttcgcgattccgattgcggcggccgacggtcgtctcggtcagagagcgaagaccgccgcaatcgatggaatcagtagattcggctacagatccgggatctacttgaggatggcctcaatgttggtctgggtcttgtccagaatcgtcttggcgtcgcctgtcttcagaccttccaactgcgcgttgaggtcggtgatcacgtcggcggcacccttggcggtcggcacggtaaccgagtagttcaggccatccatgaaggcgctcaggtcggggaactcgctcttccacttgtcggcgagtgtcttggtggcgggcatgatgccaaaggccttggcgaagtccataaccacgtcatcgctggtcaggtattcgaccagatcgacagcacccttctgatccttgctgtcggcggcgatgccccagccgttggtgaagtgcatggtgcccttgccggccgggccttccggcagctcgacgaccttgtacttgacgtccgggtagtcggcggacaggccgccggtgatccagttgccttcgatggtcatggcagccttcttggagccgaaggcctcgccaccccagccggcgccgaggtcggaggcgtacttgacggtgtcggagtcgagcagagtcttgacctcttcaaggcccttaacactcgcgtcgctgcttgcgatggccttggtgccatcgtcactgaccagaccaccgccggcctgcttcaggaagacgccgactcgtgcgtattcgccgttgaacgccagtccaacatgatcagcggtggtgagtttcttggccacatcggcaagctgatcccaagtggtcgggatatcggcatcggtcaggccggccgcggaccacatgtcggtgttgatgaccagctgcaaggtggacacatccttcggggcagcgtaaagcttgccgtcataggtgaacgtctgcagcaggttgtcgtagaaatcgctcttgttcttcagctcgtcgccgtaagcaagcaaggagccgttggaagcgtatccggcgagctgctcgggagctaggtagaacacgtcggcgggatcgccgccggcaaatccctgggacaattgctgcgccatatcgttggcaacctgcacggtggccttggtgccggacttcttcgaccatgcggcaacggccttcttgacggcctcggtctcggtgtcacccgaagaaccgatcagcacggtgagccctttcgagctgtcgctggtcaggccatcggacttggcggaatcatcgaatccactgcctccgccgcagcccgccagaagcgccagcacggccaccgaagccgcggtcatcacggtcagcttgctcctcatcatcgtgtttcttctttctcgagcgctatgcccgtccttgtcttcatcatcattggttaagttatgtaatcattagaacgttcaaataatcgctattccttaagtttcggttctacaggaaccaaaaccattggtactcgatttttcagtcatcgactcagcattgaaaaatgatgacttaatttttacgttctaataagtggctatataataaacaccaatatttgaatctgtcaaatcaggtacgattattggaacgaaccaataagtccgagcaccactgttcgagctgtacatgaacataaagggaagcactatggtcagcatcaaagacgtcgccaaagctgccggcgtctcgccccaaaccgtatccaactgcatcaataaccctgcagtggtcaagccaaccacacgcagacttgtcaacgatgccatcgctctcctgaattacacccccaacgcgtccgctcgccgcctgcgaacccaacgcagcaacaccataggcatcggcatcgcccccgtgagctattcacaggtatacgatcgcttcctgcatgcgctggtcaccgaagccgattccaacggcattcgcgtcatcctatacaaaaccgactcgcaacaggatgaaatacgccaattcgaggcgcttaccgcccgcggcgacgtcgaagctttcgtgctcaccgacaccactcacaacgatccacgactcgaatggctgcatgaccatcatcagtctttcgtcctgttcggacgaccttggggctcagcggatatgcacgatcccctcaccccctgggtagacgtagatgggcgcgccggcattgcggacatgacgcagcacttgatactgcacggtcgcaaacacatcggattcatcggctggccaggcatttccggaacaggcacagatcgttaccgcggctggaaggacaccatgctcgccgcgaagatggccactgccgacgaattcgaacaactttacgaagaaggcacggacgacatcaccgccgggcaaaccgcgtgcatctcgctattggacagacgtcctgacctcgatgccattatctgcgtcagcgacacgctggccatcggcgccgccaccgcgctgcccaatgacaccgatatcgtcatcaccggatttgacgacaccgtatccgcccaatcaatgggtctgcccagcattgctcagcctttgaccgagatcgcgcgcaacattatgcacatcatccaaaatcggcttgacgcaacgtcgcctgcgcatacggcgtcgtctctcacgtcggaatcccctgacaattgccacattctgctgccaccgtccatcgtgattcggtagacggaattccaggaacgcaaacccacgatctaatcgtaaaagcgccccgccgaatccatctcagtgaagcaaaaccacgattagaccgaagaaccaccccaccgagagccactcagcgaagcaaaaccacgagttaaccatgaaatcgctccgctgagcgatctgagcgaagcaaaatcgtgattaaaacgaagtattgccacactgagctcgactcagcgaggcaaaaccgtgattaaatcgaaagaccaccacgctgaaagccactcagcgaagcaaaaccgcgatcggctctagaaaacacctcgctgaacctatctcagtggagcaaaatcgcgaataaatggacaatccgcaccactgagactccctcaacggcgcaaaactgcgatccaatcggacatgtaccccatggaacaggatgcgcgtggcccgcacgaggcaatccgcccccccgggggcaaactccaattcggcgggtcgagaaacttggactaggctggagcatatggaacttcacgttttgaatcatccgctggttgagcacaagctcaccgttttgcgcgacaagaataccccttcctccactttccgcgagctcgtctccgaactggtcatgcttgaggcctatgaggccacccgcaacctgtccgtcgtggccgcaccaatcgagacgccggtcgccccgatgaccggcaagaagctcgccaagccacgtccgattatcgtgccggtgctgcgcgcaggtctgggcatgctcgacggaatgacccgcctcatgcctactgccgaggtcggtttcttgggcatgaagcgcgacgaggagcaccccacccagcaggtcacgtacgcaaaccgcttgccggaagacctgtccggccgccagtgcttcctgatcgacccgatgctcgccaccggcggcacgctggttgccgccacgcattatctggccgagcgcggcgccaaggatgtgaccgcaatcaacatcatcgcggctcctgagggcattaagtacgttgaggagcacatcgacccgtccatcgacttcaaggtcgtggtgtgcgcggtcgacgaaaagctcaacgacaagtgctacatcgtgccggggctcggcgacgccggcgaccgcctctacggagtaattgattaacggagcgtataccgcctttcctcagcactcgacgcaccatagtgcgccttcggcttcggacggcggtctccgcacacgttaatcaattcctcatgattgactgatttttgggctcccgctggcgggagctgtcaaacgaagtgagactgagggtggttgatatcggaaactgaccaccctcagtcggctacgccgccagctcccgccagcggtagccaaatctatggaatgaccttatgcagatcgacattattgcgccgggacgcgtgaaggagcgttaccttcgcgatgccattgacgagtactccaagcgactctcgcgctattgcaagctcaacatcattgaagtcgcggacgagaagacgcccgaccatgcctccgagggcgtggatcgccaaatcaaggccaaagaaggcgagcgcatagccaaacatctgaaggacggcgtattcgtcattgcccttgccattaatggcaagcagctttccagcgaagaactggccgcgaaaatcaatgacctaggattgcgcggtaccagtcatattcagctggttatcggcgggtcgatcggactcgatgatgcgatcctacgtcgcgccgatttcctgctgagcttctcgaagatgacgtttccacatcagcttatgcgcgtgattctgctggaacagatctaccgtgcctacaaaatcaacgccggcgaaccgtatcacaaataatcactgtcttggctcccctcagggggagccaagttgcttgctcacacctcgtcgggtacaaacgcctcgaagatgtgacggtcgaaatacggctcacattgagcaagctcctcactggaacgcacggtccaggaaaccgccgtggcgcccatcgagcgagcgagcttgacctgcggcgaagcaccaccagtccagtcatacgccacaaaatcaggacgagacaaccaattaaacgccagcagtccggcagtccattcagccgcaccatgcttatccagctttgccggccagctcaactggccacggcacacctcaggatgatgctccttgtaccagttcaccgcacccgggtggaaggactcgaccacgtaaggcccgtcatacgcctcgagcaacgcatgacccttttccatcagctcttcgctgcgctcgtcccatgcacgattattgctgaacttgtattccacaatcagcggcgcacgaccggccaccacgtccaaaacatcagagaacagcggcacatgctggtaatagccttccggggctgcggacggcgtgacgaccagaggcgggttctcgccggcacccggcagaggctcagccttgagatcgccggacttaccgttcgggaacagcgggatgcgggtgagctcgtcgtaggtcaagtcctcaatcaaccgcgaatctccggccacacgcagcaaatcagcatcatgcaccacaaccacttggccatccagcgtaagttgcacgtcaagttctatgccatagccggcctcgcacgcggcagcgaatgcagccaaggaattctcaggcgcaatcggaccagttgtatccgcactgccatagcccgccttgatggccatggcacgagcgagtgccacataatcgtcgttttcagcgatggattgccccgtggtatcggactgggcgctgacgggattgtcaccggcgtagtccgcgatatcggcaacattcaccaagccagaaccggcatcatgcagaccgcgatgcgcataccagacctcgggaatcgagggtacgaaattgcggcgcttgtcattgaatgtgcgcggggccacggcccacactgcggcacctgcggcggccacgccggccagcaccacgtttctccagagcttcgacgacattggaatccttcctgttgggctgcctctagcctaacgcttctgccagccattgtggagtggttggatcatccggcttcaacgcacggtcagggtgattggcgcgcagcggctcccaactgaaatcggccaacagatcggcgggtttgcaagggattggaacggattgtaaacgtaacagccaggcacaatagccaatgatctgttcaggggtcacgccacgggctcgcagggctcccatatccagagaacgttcgcgcttggctaaacgccgaccggccgcgttgtcgatgaggggcaaatgcacatacttcgggtgttcggcagatactcgtgcatcgctcgcacactccggccgggatcctccggccagcaggcattggcgaatccacatctgcaatgcagtggagcgtagcaaatcacggccacgcacgatgtcgtcaacgcccatatccaaatcatccacaaccacaacaagctgatagccgaacagtccatcagctcggcgaatcaccgaatcgcccacttcatgaggcaaatcgtaatgctgtggaccgtaaacacaatcatcaaaacttgtaatacagtcggcaattccatcgccacgcacgggcgttgacgcttccgatgacgtatataggttcgcaaacgggccgtccgacattgccctcggttctggcatggcgatgcgaacggagtgctggtcgccgcgagctagtcgggaatgcacctcgccgggatgattgcgaagcaaatgacggcaggtgccgggatagaccatgaaaccgtcgccttcgttgggggcggaagccgcacggatatcggcacgcgagcagaagcagggatatagcacgcctcgcgagcgcaagcactccaatgcatattcgtagcgttctgtgcgttgggactggaacatcggctcgccgtcccagtcaaggcccagccaacggagatcatccagcatgagccgatcggcaccggcaatcacgcgcggcttatccacgtcttcgatgcgcatcagcatgcggtcaccacgagagcgggccgaaagccatgcggccagcatggcatacacgttgccgatatgcatgcgtcccgatggtgtcggcgcaaatcgtccggtcactagccctcccttcgtccgccaacactcactttcctaccatatgcagcagtgaacaccttgatatcacggttcttccgctctcgggaaacgcaattgagacggaccgggaagatacttccgtttcgaggggctgatttcgatgttgcgggaggtctacttccgtttcaaggggctggcagccaagtagataaggccccaaaacggcggaatggcgttgccataaagccactgatacttgcggttcaatggatgagcagcccctcgaaatggaagtagacctccgaaagagggcaaatcagcccctcgaaatcgagatagacccacaaagacgaacaggtgggtatgactgctaccatacccacctgtttaagagattttgcagagaaaaaccactgttgcgaagccgcccgaactcccctcagtcagcttcgctgacagctcccctcgaagaggggagccagtgattgtcacttgtcttcggagacgttgtctacgctcacgtccggatcgtcggaggcaatctggtcactcgcccaggcggagagctccaggtgttcgccgccggtctggtcgacgagcacggtgtcgccgtcgtggaccttgccggccagcaacatgcgggccagctggtcgccaacttcggtctgcaccaagcgacgcagcggacgagcgccataggccgggtcgtagccggtgttggccagccactcgcgagccgaatcggtgacgtccagcgtgatgcgacggtcggtcaggcgctgggccacgcccttgacctggatatccacgatgccgccaagctcctcgcgcgtgagcgggtggaacatgacaatatcgtccaaacggttcaggaactccggcttgaagttcatgtggaccgcatccatcacggcctttttcttggcgtcggcggccatgtcctcgttcacgaggaactgcgagcccaagttggaggtcatgatcaggatcgtgttcttgaagtccacggtcctgccctgaccatcggtcaggcggccatcatcgagtacctgcagcagcacgtcgaagatctccggattggccttttcgacctcatcgaacagcaccacggagtacgggcgacggcgcacggcttcggtcagctgaccgccctgctcgtaacccacgtagcccggagccgcgccgatcaggcgcgagaccgaagccttctccatgtattcggacatgtcgatgcggaccatggccttctcgtcgtcgaacaggaagtcggcgagcgccttggccagctcggtcttacccacaccggtgggaccaaggaacaggaacgatccggtcggacggttcgggtcggagataccggcacgcgaacgacgcaccgcgtcggacacggcggcgatggcttccttctggccgatcacgcgctggctgaggtagtcctccatgtgcagcagcttctcgttttcgccctgcatcaggcggccaacgggaatgccggtccagttggagacgatttcagccaccgagtcggcgtccacgcggtccggaaccatcggctcatcggccgggttggccgcgccggtttcggtggattcggcatccgcgctttccgcagcggcgagctccttctgaatggccggaatctctccgtacagaatcttcgaggcctcagccagatttccctcacgagtgaacttgtccgcctgaacacgcaggtcatcgagcttggcacgcaggtcaccgaccttgttatggccggcctgttccgcatcccaacgcgccttgaggccgctgagcttctcacgggtgtccgcgagttcggcttgcagcttgcccagacgctccttggacgcgggatcctcggccttcttgagctgcatttcctccatctcaagacgggtcaccttgcgctgcagctcatcgatttcctcaggcgaggagtcgagctccatacgcaggtgggcagccgcctcatcaaccagatcgatggccttgtccggcagctgacgacccgaaatgtagcggttcgacagggttgcggcggcaaccaacgcgtcatcgccgattgttaccttatggtgagcctcgtaacgctgcttcaggccacgcagaatggcgatggtgtcttccacggaaggctcgcccacgaacacctgctggaaacgacgctccagcgccggatccttctcgatgttctcgcggtactcgtccagcgtggtcgcgccgatcagtcgcagctcgccgcgggccagcatgggcttgagcatattgccggcatccatggagccttcggccgcacccgcgccgacgatggtatggatctcgtcgatgaaggtgatgatctggccgtccgcgttcttgatttcgttgagcacgctcttcaggcgctcctcgaactcaccacggtacttcgagccggccaccatggagcccaggtcaagggagatgagcttcttgccctgcagggtggtgggcacgtcgcccgccacgatacgctgggccaagccctccacgacggcggtcttgccgacgccaggctcaccgatcagcacagggttgtttttggtacggcggctcagaatctgaatcacacggcgaatctcctggtcacgaccgataaccgggtcgagcttgccttccttggcggcggccgtcaggtcggtagagtacttctccaaagccttgtacgagccttccgcgtccgggctggtgactttcgcgccgccgcgcacgccgggcacagccttacgcagggaagcggcggtgacgccgtttttctccaggatttcagccgactggttcggcttgctggccgcgatgccgatgagcaggtgctcggtggagacgtattcgtcgcccatctgctgcatttccttctcggcctgggcgatggctgcggtcagctgacggctggcctgcggctgcgaagtgctggagccggacgcactcggcagcgcgaccaaagcgttacgcacggcagcgccgatggcctgtgggtctccgcccgcggccttgatgagggagcgcaccacgccgttttcctgacgcagcaacgcatccatgacgtgcagggtctcaacctgcgcgtttcctgcggcggacgcactctgaatcgcgtcgccgacggcttcttgggccatagtggtgaacttctgttccatatcgtattcctccatgtcatgcgttccgctgcgtctcgtcttgaggtttcgcacgctctgcgagcgccgtagcagaccgcaatgtgtcgttatctgatatgctcaaccgacctgacgcctattctattcccaaaagttgagtgtaagtgactcaagttttggaacccgcgcaggttttcgagtgaggaaggttagagacggcgccagaaatggttgaaattggtctgttttggggttgaccactctcagtccgcttctgcggacagctctcaccagcgggagcaagcctagacgggcgtccacaatatgcgccgggaggcgagatatgccccgcgacactcctatactcgcactcggtttgttgtgcgcttgaaccgctccccgactactgcggctagcgcgttgtgggataagagaagaacatgattttccaagccggttcgctactgctcgttattatcggcgcctacgcactcaagcacgtccatattttcggcgaacgcgattacagggttgttcaaggactggtgttcaacctcacgctgccgtgcgcgattatcctgtcgttcgccactaacaagcacgatatgcgcatgctgtggattgtgctgttcggcttcttcgcctgcgcgattccgctgttcatcgtgtatatcggatcgcgtggcgacgagaagaactaccgcgccttccaaatgctcaacgcctcgggactgaatctcggcgcattctgtctgccggtggtgcagacctttatgggcgcatccgctggcttgccgatcatcatgctcgatatcggcaacgccaccgtggccacggcaggttcactgaccatcacgcgcacgctgctgcatatggacgagaacttcaaatcgctgccgcttatcctgcgcctgcgcaacattgcccgtgattttctgagttcgatttcgttcgacatctacatgctgatgctggtgttcatgttcctgcacatcacgattccgcagcctatcgtcacaatcattacgccatttgccaacgcgaacgctttctgcgccatggcgatgatcgggctcatgatggagattccagacaaccgtaaagacaaggtggagctgggcaaggtaatcacctggcgtatggtgttcggcgcaattatcgccgtagcggcatggttcctgctgccgtttgacatgagaatccgcgaaatcatcgtgctgggctcctttgccccaatcacgattttctcgaccaagttcaccgattcgttgaccggcaatgccaagctcgccggcttctcattaacagtgacggccatcatcagcttggcggtgatgaccgtcttgcacgcgcttctaccgggagcgtaaggcgcgttcttggctcccctctccgaggggagccagaaacatctacgcccgcacaatcacgttgcgcagatcgccaataccctcgacgtgcacaatggtctcgtcaccgggatcaagatgaccggaagcattcggcgtaccggtcatgattacgtcgccgggcagcagtgtggagaagctggagattgcggcgatctgctcagggatgccgtgaatcaggtttgcggtagtaccggatgccatcggcacgtcctcgccgttcagcgtgaacgaaatcttggcgtccttccaattcaggtcatcacgcatcacgatccacgggccgatcgggcaggaggtatcgaatcccttggctcgcgtccatgtgggatcgatgccctgcaggtcgcgcagcgtcacgtcgttcacgcaggtgaagccaagcacgtaatccattgcgttctcaacggtcacgttcttggcaatacgacccatcaccacggccacttccggctcgaagttcatgtccttggagcaggccgggtacacgatcggatcatcgggaccaatcaccgaggtggacggctttgtgaaaatcaccatgttctcaggcgcatgggcgatttccgaatggccagcctcgtgcatgaactgggcgtgcgcctcatagttcttggccagaccgtagaccttggaaggaatcactggagaaagtaggcggatgccatcgccatcaaccgggtaacgattaccggtaggagtgacttggccgccggccagcggatgaccgtccagctcgatgaggtagtccttgccgtccgtttcgtccttctgcacgaaggcgtagcgcggcgaatcattcaaagaaaaacgtgcgagtctcatgactccaagactacgcccagcccgcgcccggcaacgactattcctctcacggccagtcaatgccacgccgcaggaatctcatcacctattcattcgctgatggaaaccgctggagagtagacggtaaaagcaggggaccattccgacacgccattcagctgctcaagcgcacgatccaaatcatcgatatcgatatcgccagaatcgtcgtagtcgtactggtcgtcataatagtacgaatcatactgatcgtccatgtcgtcgtatctgctgtatgaataatccgaccgcaaatcattcgtcacggcatcgaccatacccgaaaagagaccgacgataatcatcacaatcagcagcagatagatgcccagctttgccacgctgatgatgatgcccgcaatggccaagcctttgcctttgccgtcctgccgtttgatctggttcaagccgatgatgctgaaaatcaaaccgatgattgaggtaaagaacgagcagacaaagcccgcaatggcaaacccgttgtactgctgattggccgctgggggcatatagccatactgctgggcatagggctggctgtagttcggattgtactgatgcccatacggcgttccgccttgagcgtacggattgtacggtgtctgcggaggcacggaaccgccaccaggataagtattattgggctgctgggatccagcctcgccggatggatttgcagcacccgaatcggattcagatgaaggcgccggagcctgctcgggctgccacggcgactgccccgaaccggcataaagattggtgttggaatcagtcatagcctctgctccttcagcttgcgcacgcctcgcgatgaggcatgactttcattctatccccagtgacaatcgtaacgaaagacgtgcgggaatacgacatcccctttctacagcccccagcaatcgaactcctacacagttagacttgtgatatgagacatcgtcgttttgccgtggttcttctcgtaccgctgattgcgctactcgcttcttgcgggacgccccaatctgcgccaaccactgaaccaaaaaagcagcaatcctcgcagactcccaagagcaacagcaagacggattccaatcagcagaagactgttgttgatgacccaacccagggcgactggacagacgcctactccggccccagtgacctggacggggagcttgacgaagcatggctggattgcgcaccgcacaatgcgcccgatcccgaggcattctcctggaagaggtctacagatcacagcaaagtgtggatgcacgccaccgagggcggtatggatggctcgtcacagcgctcctgcatagccgatgaactggatattgcggacaccgcagatctcagcgactcgtggactgtgacgtcgctgggagattatgaccgttatcagaagcgcagcggcaacgtcattaatatcgtctggcagtacagcgacgcagtcaaaaagtcgctcaccgtggaatctgattcgtatcgcgtcaccttgccctactcgtggcacaacaaaatcaccacctcggtggacggcagcaccatcaccgtcaccgaccgagaacacccgaaatatgcgctatgcacgttccaagtctcggattccagcaacgccggagacataggtaccagcctcatccagaaatatcaggccggcaacacccccgtgcagatgtgggccacacgatgggcatttgtcgccgcctccgacccgccctccatttcggcggacgacgctgaagacgttaccgatctgcaaaccggaggcaccgttgaatatgactccatctccgcccagattcgcgccggagacacctcaggcgtattcgccatagacgactacctcaaagcgcacatcgccgtcagcgatttgtagtcaccccaaagaatcaacaagtccgaagccatcatgattatcgttggcataatcatgacggcttcggacttggggttggattcgttgcgcaatcgcgcaatcggctgttacttggccagcagcggcgcgacccgctcctcgtaagcggtgagggcggtgtcaatcacgttgtgcatgtcgtagtacttgtaagtgccgaggcggccgccgaacacggtgttcggctcggccttggccttggcctcgtactgggcgtacagcgccttgtccgcgtcggtgttcaccgggtagtacggctcgtcgccgcgctcggcgaagcggctgtattcctcccacaccacggtcttgtccgggttctgggagtcgtggcgctccgggttgaagttcttgaactcgatggctcgggtgtagggcacgtccgcgtcggagaagttcatcaccgggcatccgaagtggtcgccctcgtcgtagcggacctccttgaagtccaccgtgcgccacttgaggtcgcccagctcgtagtcgaaatagcggtccaccggacccgtgtacaccaccggcacgcccgcggccttgagcgcggtcttgttgtacggctgggattcgtcgaagaagtccacgcccagctccacggtgatgcgcgggtcgtcgatcatgcgctccatccacttggtgtagccgtccgcgggcaggccctcccacgtgtccttgaagtagcgattgtcgtagttgaagcgcacgggcaagcgtttgatgatggcggccggcagctcggaggggtcggtctgccactgcttgccggtgtagttcttgatgaacgcctcatacagcgggcgaccgatcagctggatgcccttgtcgttgaggttctgcggatcagtgccggccagctcgcccgcctgctcggcgatgagcttctgcgcctcggccggcgtgtagtgggcatggaagaactggttgatggtacccaggttgatgggcagcgggtagacctcgccatcgtgcgtggcgtacacgcggtgcacatagttggtgaagctcgtaaagcggttcacgtagtcccacacacgcttgttggaggtatggaacagatgagcgccgtacttgtggatctccgcgcccgtctcctcatcgatatacgagtatgcgttgccgccgatgtggtcgcgcacgtcgatgatgtgcacgcgagcgccggtgtgctccaccgcctgctgcgccaccgtcagaccgaacaggcctgcgccaacgataacgagatcgggatactcaacagaagatgccatgtgcagacaatccttccagcaataagctttcaagcgcaacatttgattcgtcattatcctaccgatgagacgagccataccaaaattacgagctaaaactcaatgctggattgtcacatatttcattccacacagatttatggctcttcggcgagctcgtcaacgatttgatcctccgcctcgccgaggaacacctctatgccccatactggtcacaacagatactcgatgagctgaggagaaacctccaattacgcataggagaagagcgttcggcgcaacgtgtcaatgcgatgactgccgcattcccagaggctctagtcactggttacgaaagcctcatcaaaaatatgacatgcgacgaaaagaccggcacgtacttgcagcagcagattattcacccgcacaaaccttggtcaccttcaacacgaaagattttcctgaaacttcgacacagcctcttcgcatcgaagtaaagggacccgatgatttcttcctcgatgtattggatcttgatccaggaagagtggcaagagtttgtcacgcggcactgctgagctataaacgatatccacaaacgcctgaagactacgcagacatgctccggaaaagcggtgtacccgaatttgcgaattgcctctaccccattctcgatgccttgagtctgaattgacttccacaggtgtctttatcgtcaataatcaaacatcctcgagcaaaagtaccccattaaacgtatcgcagctcggctaggaaacgtgccatactggatacgtccgcatatacaaagaggaagcacaagccttgccaatcaacgccactcccctcatttccgtaatcgtgccggtatacaacgccgaagactacctgcgctactgcgtggactccattctgcagcagtcgtatacgaacctcgaggtgattctggtggacgatggggccaaggattccagcccggccatctgcgatgagtatgcggcgcaggacagccgcatcaccgtgatccatcaggagaacggcggcatcgccaaggcccagaacaccggcctcgatgccgcacatggcgagtacatcgcgtttgccgacaatgacgacatcctcgaccgctgcaatattgaatatctgctgcacgcattgcaaaacaccggagcggatatgagcaaggcgcgttggcgtcagttcggagtctcccagttgggcgaagtgtccaaagaggccgagacgggcgcgcaggcgcccggcaaaatcactgtgttcgagcacccgctcgccgcctaccagaccgtgttctgcaaaagcctgcgactgctcggcagcaagctcggccgcaacaccgaggcccgctacttcaacgaggcgaactggtgccgcctgtacaagcgcgagctgtgggacggcctgcggttccccgagggccattacgcgcaggatatccgcatggcaggccctctgtacgcccgcatgggcaaagtggccgacatcgattgcgtgctctattactggcttcaggagcccggttcggtgacgcactcgaagcgaaccgccgcattctggcatgacaacgtgctctccgcggccgagaatttccagttcactctggaacagggcatcaccccttgccggaactacttcggcctgactgccagcgtgcgcgacgaaggaaaaggtctcaaggcgctcgtctccgaagaactacacgacagcgactggcagaaccatctcgatgacgtggccactatgcgcgctctgatcagcaggctcagcatcggcgaacgcctgaaatgcgcggtacttgccgcgattcgctcctgtgagaatgtcgtatacgataatcgcatccactcgatgaagtagaaaagtcactgagcccagcaaaccctcgcattcagcaggctagagcgggctgccttccattcctattgtcaactacgactagtcccaacaggaataccggcaatatcgggagcgcataacggccttggattccctcaaagacctcaaacctactcatagacgccaggtcattccaggtaagccccacgaagagcacaaacgccgctatctctgcaattgcgatcaccaaggccagaaccaagaatcgatgtcttcctgcccacgaggccagtgtcacctgacccgtccagtgctgcttcaccgtataggccactgctaccaaccagaccaaccccaaaacggccgccattgcgacataccaagtcggcagataagcaaaagtcccgaggaacagcatggaatgcactattttgccaatagtgagtattggatgagacaatgcaacactcacattatgtgatacatccacctgcgccaacgagctaccgaacagtacgctccacggaagatacagcgctcctgtcagaaccgccgcaatccccacaaattctagcttgcggcgcacagccatcaccgcagaaggtaggaacagcacagcaaccgccacaaacgcatagggaagtttttcacacgccaaggcccacgccagcacccccaaaaccgcagtgtacggaagagaaatcacacgtttgccctcagcaaccgccgcaatagccgccaccatgcaagccgaaagtgccacaatcatgccatcaatcatcaggctcgatgccacaaacgccaccggtggaataaccaatagcaacgccatcagcgatttccaacgcggtaacagcgcaatggcgaagcaccccataatcgcatacagaatgctgttggatattcgtgccgcctgccactgcgcgtacggtggcaaattcaccagcatggcgattttcaggccaatggcttggggcaagtaatcaagcggaaaatacgcgttagagcgattggtgtgtgtcccatccggcacaacgatgtgatcagccatcacatcatcagcactttgctgcgtttcccgcgacgagtcgccctgcgtcgccctactgattgactcaacaatcggaacgttcgcgaatcccggaatcgtcagcaaacgcgaatcaccctcaatggactgttgcttgacggtgttgccgtgcgcatcctttccctttgcaacaggattcaacgattgtcctgtggccaatgcgtacgtggacaacggatgcatatcaggatctggaatagtaagagggccaacctgaacgatgaacatacaggcctgcagcgcgaacaacaccaggaagataaaaatattgcacgcagtccccttcaagacatgtgccacatgcttcataacgccctaccttccggtcattcgtccacagtctaccgcacacgcacaccgcaagggcctaccaatacctggtcaattccaacataattcgccacagcacatttagggatgcctttatcttgagcttcttattacaatactcaagtacgttgtttatagaaatgagcgagcagagtggacgacatccaaaacgaccaggaaccttcagcgcaaaagtctggcacggatatggaaaaaaccgaagtcccagctgttccctcaaaacagaatgacgatcagcaaagcaacaaattgccgctgcctttcgcgttgaactttagcatattgatggcttcaaagcccatggtcatgctggccaaagccatatctttcttgcgcacactattgaagaagcgcccccgctgcccctacacgttgtacgtagtggtcatggcaatggttgacgccgcagcagtgctgttcatccaatggagcatgtacgaggaacccacatatgccgatccggatgcagtagatgacaccaccaaaatgttcaatagcgtggctgggcagctgacgaaattcgttgcccagatgtggatggaacacaactacgtctggctgctcaacttcctagtactaggcatggtatacctcgtactgatatttgtcttgaaccggttctgggtggcaaccgccctattctccattctcacgtcaatctacgccgtggcgaacagcatcaaggtcgacctgcgcaacgaacccatcatcccttctgatttgggattcctctccagcggcaacggtggggaaatcacatcattcatccctaaagacagccagccactggtcaacggcaccattaccatgcttatctggctgactattatttgtctggcattgcagcttatcgatggtcgccgctgcgtgatttcgttccactggtggtgtccattccgcaatgtcaagaccatcatcggcaattgcacacgcatcattgccgcggtactcagcgttactctgctctggtcgttcacttggaatctgggagttaacggctcatggtcttacaagtgggcaaagagtctaggcgatgatcccctgctatggagcacggttgtcgacgccacctataacgggccaaccgtgggctttctgcggctagcacacgcaaaaaccatggataagcccaaggattacaacaaagagaccatggaggctttggctaaacgttataaggaaagcgcccaagccactaacgaggcacgcgccaataacctcaccgacagtaccgtagtcatgattctttcggaatcattctccgacccgactcgcgtgccgggagttgaactcactgaagatccgataccgaatattcacgcccttgaaggcactaccacttcaggcctgatgctttcgccgggcatcggtggaggcacagccaatatcgaacatcaggcattaacaggccttagcctggcgttgttcgacaattccatgcaatcgccttatcaggagcttgtcccgcaccagaaaacgccttatacgttcaaccaaatatggaatgatgcttacggcaagaatggttccgtggcgttccacccatacttcaagaacatgtatctgcgcgatagcaactacaagaaatttggtttcagcaagttgtattcgcttgacagcaaacctcccatcacacatcaagatcacatcgatagttctccctatgtgagtgatgccgcctcgtaccagaacgttcttgattcaatcaacagcaatgatcacacccagttcattcagctggttaccatgcagaatcatgcgccctacaatgatttctacgcggacaaccagttcaaagaagccgatgtttcccaactctccgacgaagagaaacagtctatcgataattacgccaagggcatcagcctcaccgatcaggagactgcggactttttgaaccagctcaatacagttgataagccagtcaccgttatcttctacggcgatcatctgcccggcatctacagcaccgcgaccaaagacaagaacaatactcttgtcatgcatgagaccgattactttatatggtcaaatcaggcgtccgcgtctgccggtgtcaaactcgaccagcagaccgccggttatgtctcatcgaactatttcatggctttggctgctgaacatatgaatgccaaggtgtcaccttatctggaaatgctgacgcaggtgcaagtgcagatgccggcaatcagccgactgatcagctccaacgattcctggggcgatggcagcaccgcctatctggatgctgaagggaaccgcgtcaagcgtaaggatctttccaaggaagccaagcaactactaaatgattaccgtctcgtgcaatacgatatgagtaagggtaagggctaccttaacgacgatggattctttgcagttaagtaagcaaaaggggcatcagacggttgtccaatgccccacgaatcgcttacttctctcgaacccaatagttgcctgatgtacgagacaggtttggattgtaatacggatcgttatctacgatttcggcatacttcttgcggaatttcgcagattcccgatccagtcgagccttctttttcttgctctcgatatcgtacccgcgcgtgacggactcgtagtggtatagctccacctcatgcgcccacacgatgtcacgtccaagctgttcgtgaatccgaatgcacagatcgacatcgttataagcaaccgccaaagcctcatcaaaaccatgcaccgcacggaagtcatcggccttcaccatgcagcacgccgccgtgacggcagagtaattgacgttttcgatgagtcggccgaagtagccaaaatctccacgggggaaaccgacctgaatgtgtcctgccgctccgccaagaccgagcacgatacccgcgtgctgaatggtctcagtaggatagtacagctttgctcccacgacgccgattcgatccagctgcgcgaacgacaccattctggtcatccaagatgggctgatgacttcagtatcgtcgttgaggaacagcaagtaacgaccggaagctttttgagcagctatattgttaatccgcgagaagttgaacgggatgtcaatctcttccacacggaaacgatcaccaagcttcttggcaaaacgctggtacagatcctgcatatgcgggttgtcgctgccgttatcggcgatgatgatctcgtaattgcggtaatccgtcttgtcaagaattgagctgacacaacgttcgatattgtcgtacccgttcttcgtcgggatgattaccgacaccagctcgtcgccggagacatcgtaatgcacgttataaatgccattcggaccggcggaaaccacttcagcctgaataccgcgtctgtcaaccgccgactgcaatgcgcgcaaaccagcgtcggatgtgtagctcttggcaccgccgctagacgcggtagaagttgccaaagtgcgccaatgatagagcaccttcgcgatgtgctggatgtgatcaggagtggttttttctacgaagcgaagcaccagatcatagtcctgcgagccctcatagccgacccggaaaccaccgatttcatctacgatgctctttcgatacacaccgaaatgactgatgtagttagtactcatcagcaaatcgggagaatagttcggcttgaaatgcgggtcgaagcggttcccctcttcgtcctctttgtcttcgtcactgtagataagatccgtgtccggatgctcattgagggtcttcactacctcaaacagtgtctggggagccagttcatcgtcattgtcaagcaaaccgacgaactctcctgaggcctcttccaaagccgaattcgttgctctggaaatgtgcccgttttcagggcggaacaccactttgatgcgagaatcctgctgtgcataccgttcaagcagcggacgcacatgcggctcggacgaatgatcatcagccaggcacaactcccagttggggtatgactggttacgaaccgaatccacacacttttccagccacttcggctccacgttatataccggcaccagcagtgaaatcaacggctgatatgcaaacaaggaaatctcattgcgcactgccgtctcgtcgtagcgctctgttcgacgaatgaggttatggtacacgtgcttctgccaacgagggccccaatacttatccagcagacgcctcgtggtacgacgcggatgtcccagtagtgcaaccttgcgcaggaagttcgacaatcccgcaagaacaggcgacgactgaaccgggatgacgacttcctgactatctgtggaggtcctcatacgcagacgcagcttgtcgttcgccaattgcttgcgtccacccggcaccgatatttctgcacggaagccaagaatagaatctgggggaaccgtagttattgcattcacgtcaggacgaccgtaacggctcaggctgcgcaaactcgccacaggagattccgccaaagagatatcaacctgttcaccaccgtgtatatcggcagcccatccgttgacgagcacagtggatccgtcttgcttagcatccacttgatcaaggttgtatacaatgccccgctgttcctcggaagcaggcgggaagcatgcagccgcaaacggatcaacgatctcgcgatgcatcttcagatattctgcaatgtcatccttattgattgacaagtgagtacgcttgcaatccgtgaaaaccgaatacggctcccaaagcacagtatgaccggactgctgatacatgcgagcgcaatagtcaataccgcgcagtccctctgccaggcgcgtattgagtccgcctatttccacgaattccttgcgacgcaccagcatgcaatcttccgtggccgcgaacatgtcacgaggaagcagatctctgaagtagtaaccgattccttcatcccaggaaccgcgcatttcaaaaggctcaccttgcttcaacgcccgaagagtgacgcccacattgagcacacgcttcttggtatcaaacaccttaccgcccacaacgccaacagaagagggacgcgcataattcaccatttcgcgtagccatgtgccatcggtcggcttcatgccgttcaacagcacaatcacatcttcagaacgacgttttgccacatcattgacggaatccgctgcagcagcaatcacagtgaacgacggataatccgtcatctctcgtagctgcttcacttgcgcatcagacagagaagaagcaaccaccgcaactgtcggagtgtaatcggcatagtcaatcttatacgtaccgagattgtcgagcattcgcacgtcaccggctattcctcgacgctccaaggccgcttcgatcgccttgcgaccagcctcataggcatacatcttgcttcgggggtctccggccacggagcttgcaagggtgcgccagtggtacagcatctgcggaatatgatgaacgtgatgtgcctgctcggtggcacgcagcacgaagtcataatcctggctgccgtcgtattcgctgcgcaatgcgccaaccttgtccaacagcgcacggctcactacgacgaaatgagtgatgtagttatgaccgagcaataggtttggcgaataatccggcttgaagaacgggtcaaagcgcttgccctgctcgttaatcttgtcttcatcggaatacacgaaatccgtatcgggctggtcattcaacgctcggacgacttcaaacaacgcctgtggtgccagttcatcgtcattgtccatgaagccgacgtaatcaccagtagcgagttctatggcagaattcgtcgccgccgcaatacgtccgttgctgtcacgaaagacaatcttgatacgggaatcgctcgcggcaagctcttccagcagcggcttgacgtgcgcagaaggcgaatggtcatcagccaggcacaattcccagttggtgtaccactggttttgcatggattcaacgcatttgcgcagccagacctcgtccacgttgtacacaggtgtcaccacagagatgagcggagtcttggaaaatgcggcaatgacgggctcagcttcctgctgagtcatcgtttcatgacgctgaatccaggaatcgtaaaaatccgtctcaccaacaacacgacgccttaccgcgtctcgcaaatccttcatcgcctcgcgattgccaaggtgcgcggcataaaacatgagcctgtgcacgcgggtgctgatgtattgcatgcggaatcgactcatcaaacgctgaacattgatgtgccttgtcatggtcgtgccaggcgcctgacacatcaagtcgaaattctgcactccctgaggaataacaatcgtgaagcctgcttgatcgctgggatccaatccatacgtcttttccagatcaacacgagtattccgcgataccgtcatacccgtgccggctacagccagtggtagggcggtctgcctcatcttgtcaaccgcccagccggtcactatagtccgagactgttccccaaccttgacgttctctactttttcgactgttacctgatatgtacgatcattcaacagcgtcagcatgcttgttctgtccttatcatctcagcagacgaattaatcgattgtcacttgcaccgtattgtccgggttcaccactgacatcacttccgcggcggatcccttgatgtggaatctgcaggcattctctgccaactgcaaacgctcagagtccgtctgcagagcaatacagatgcggaaatcgccaaatgcgagcacattcttcaccgcaaattcggccgtatgcttaccggctgaaatcttatcgtcctcggagccaaacggcatggaaagcacgggaacattgcggccatcaaacacatcgacgaacagctggttcgcaggaaccggacgatcgcattcgaagtcaacattcatggtgaagtcctcgcgcgtatccaggaatttctgcgtctcgccatcgacggcaacgtttacggcattcacggtcacggcattgcgaatagccgcttccttttgccgtgcctccactacttcgcgcgggggaaggaacgaatccgagtaagcatcagcaatctcgtcagggtcgccgatcttcgcaatatagccgtcctgaatgagcattgcccgatcgcaatacctgcgcacatctggcatggagtgggtgaccagaataaccgtcttcttgttgcgcttcgcctcaaagaaatagttctggcacttcttctggaaagcttcatcgcccacggcaagcacctcatcaagaacgaggatgtcgccctgcgatttaattgccacagagaatgccagacgcacttgcataccgctggagtagttcttcagcttctgttccatgaagtcgccgagttcggcgaactccacgatgtcgtcatacatggcatcaatctcgtcgttggagaaaccaagcatggcaccattgagatatacgttctcgcggccagtcagttcaggattgaatccaacacccaactcaataaagggcacgagtttgccgtccacctcgattgtgcctgtattcggcgtgtaaatctgggaaatcagtttcagcagagtggatttaccagagccgttcttaccgacaatgccgaaaaactcaccttgtttgatatcaaaggtgatgtctttcagcacttcctgcgtacggtacccgcgaatgccacggagccaattgaacagcatgttcttcaggctgccagcacgttcaaccggaagtttgaagttcttggatacgtgctccaccttgagcgccaccggtcggtcagcgttcttctgttccatcgctttgtccatcttgttcatcgtcacaccaactccgcgaagtactgggatttaacggtgaaatacttcaaaccacccaagaagatcagtacagaaagaataatcggccagcactgcaggaatgggttatccacccactgccaaatggtctgatttgcagggctaatcatcacatgacgcgcatcctgaacgatttgcgccaccgggttgagaatcagatcgagccgggcaaatatcggaccatattcgcccgcctttgaagtgataagggaaatagggtagataataggcgtggcatagaatccagcctgcattaccacttcccagatggggttcaagtcacgcagattgacatacacggcactgaggaagaaagcgattcccaacgacagcatatacaactcaagcaccagaggaaccatcagcaaccacgaccaggtaagactgacgccgttaatcagagcaaataccaccaccacaacaaagttgatgccgaagttaatcatggcgttcatggatgaggcaatgacaatcacatacttcgagaagtgaatcttgcgcagcagatcaccatgccccacaatcgacatcatgccgccggtagtggtttcgttgaagaaattccacatgatgatgcccagcaaaagcgccacggagaagtgaggcacatcagcaccgaacttcaggaaccggacgaacacgagatacatgatggtgaacagcatcagtggcttgagcacagaccagatgtatcccaagaaggactgctggtagcgaagtttgaagtcggtgctaaccatcgccttcagtaataggcggttcttcctggtgaagatttccgtgatgttcaaaattgctcctcaaatacaacaaacccgcatattttatcagcgcggactaacaatttatgcgggttttcagtgaaggtctatcgatccatcggtttgacgatgaacttattatccgccacatccttcagatgcttgccatacgggctcttgccatacttcacagcggcctccatcagctcatcacgagtaatccaaccgttctcaaaagcgatctcttcggcaacggcgatcggcaggccctgagcacgctgcacggtgcgcacgaattcgcctgcctcatacagggagtccatggtaccggtatccagccaagcatagccgcggccaagcgtctgcacgttgagggtgccgtcttccagatacatcttgttcagatcggtaatctccagctcgccacggggggacggcttgacctgcttggcgaactcggtgacgcgttcgtcgtagaagtacaggccggtcaccgcataattgctggccgggtgctccggcttctcaacgatggaaatggccttcttgttctcatcgaattcgaccacgccgtatcgctcaggatcgtcgacgtagtagccgaacactgtggcaccatgttccaccgtggcggccttacgcagcgtcctgcccaaaccgttgccgtagaagatgttgtcgccgagcaccagcgcgcacggctcaccatcgatgaactcctcgccgaggatgaatgcctgggccaggccatccggggaaggctgcaccttgtaagagaagctcacgccatactgggagccgtctcccaacaaacgttcgaagttcggcagatccttcggcgtggagatgatcagaatgtcacggatgcccgccatcatcagcacgctcaacgggtagtagatcatcggcttgtcatacacgggaagcagctgcttcgaggtcaccgtggtcagagggtacagtctcgtgcccgaacctccagcgagaataatgcctttcacgaaaaacctgctttccacaacgttttactcgttattcgtctacaaacatattcagcttagctaactcttattcaaaatgaaaaaccgcgcagagagcctgcgcggttttatcacttgaagtcaactgttatgaacagctatcagtcgagttccttctgcacgtaggccctgagggtctcttcccagtcggcgggcacgtatccggcttcaccgatcttggcaagatccagtgcggagttgaccggacgcggagataccgggttggtcgcgttcgcgaagtactcggcggtgctgatgggcttgaccttgctgccgttgccgttcgtcaggtcgaacacctcggccgcgatatcagcccaggacttcactgcgccggagccggtcaagttgtaggtgccgtagggggcgtggctgtcgagcaggtggaaaatcgcctcggccatgtccttggtgaaggtcaggcgaccgtactggtcatccaccacggtgacctgttccagcttgtcggccgggtcggcgaccttgttggacagcatcatcatggtcttcacgaagttgtgcccctcgccgatcacccagctggaacgcaggatgtaatgctcgggtgcgttggccacggcgatgtcgcccgcagccttggtctggccgtacacgccaagcggggcgaacacctccgtctccgtgtgttccttggcggtgccgtcgaacacataatccgaactcacgtgcacgagggtgatgtggtggtccttggccaccttggccagcagagccggaccctgggcgttcgccttccacgcgatcggacggccttcggcggtctcggccttgtcgacggccgtgtaggcaccggcgttgatgatcgtgccgtacaacgaccagtcgtacttgtcgtacgcgttcgggtcggagaagtcgaactcgtcgatgtccgtgtactcgaagccctccagaccatgcgcttccgcgtaggcgcggatcgcgtggcccagctggccgttgcagcccgtcaccagggtgcgcttgggagccatgggcttggcgtccttgagcatcggatggtgcagatcggcctcgctgcgttcggactcctccagcggaatcggccactggatgttcagttccggatccgcaaggttcacgaacgtgtaggtcttcttctgttcgagcgaccagtgcgcgttcaccagatacgtgtacaccgtgccgtcctgcagtgcctggaagctgttgcccacgccgcgaggcacgtagattgccttggacggatccaaacgggtcgtgtacacctggccgaagctctcgcccgggcgcaggtcaacccatgcgccgaagatctcgccggccgcgatgctgatgtacttgtcccacggctccgcgtgaatgccacgggtgacgcccttggtggcgttgtagctgatgttgttctgcaccgggccgaagtccggcagacccagacccatcatcttggcgcgctgccagttttccttgaaccagccacggttgtcgccatgcaccggcaggtcgaacaccagaaggcccgggatgttcgtcttctcgaccttcagttccttctcgaattcaaatgccatgatcggatcactgtccctgctgcttgtacttggcttcggtggcggccttggccggctcccaccaggcacggttgtccgtgtaccacttgatggtctgctccaggcccttctggaagtccgtgtgcgtcggcttccagccgagctcggtccgcagcttggtggagtcgatcgcgtagcggcggtcgtggccgggacggtccttcacccagtcgaacgcgtccgggctcttgcccatcacggtcaggatgtcgcgcagcaccgtgatgttgttgcgttccccgtccgcgccgatcagatacgtctcgcccagacggcccttggtcaggatggtccacacgcccgtggagtggtcgtccgtatggatccagtcgcgcacgttctcgccgttgccgtacagcttcgggcgaagaccctcgaggacgttcgtgatctggcgcgggatgaacttctccacgtgctggaaggggccgtagttgttcgagcagttgctgatcgtggcgcggatgccgaacgtgcggtgccacgcgcgcaccagcaggtccgagctcgccttcgtcgagctgtacgggctggacggatggtacggggtccgctccgtgaacttggccggatcgtccaaagccaggtcgccgtacacctcgtccgtgctcacgtggtggtagcgcacgtcgtacttgcgggccgcctccaagaggcggaacgtgccctccacgttggtcttcaggaacggctccgggttcgcgatcgagttgtcgttgtgggattccgccgcgtagtgcacgatcgcgtcatggcccggaacgatcttgtcgagcagctcggcgtcgcagatgttgccgtgcacgaactccacacggtcgcccaggatgcccctgatgttctccaggttgcccgcatacgtcaacgcgtccaaaaccgtgacatgcacgtccggatggttgttgtacacgtaatggacgaaattcgaaccgatgaaaccacagccaccggtcacaatgatgttatggggagtaaacagttcttcagccataacctacagcatatcgtcaggcataccgagacggcgagaaaggacattgttactggtgttgaacaatccgatatggggttcgcccatcaatcgtttcgccaatgcgctcgaacgaatacccattgaactgcatcgcatccagtttctgcggagaaagcacattgctcacacctagcttgcgcaattgctccggcgtgacatgcacggtaaacgaatcaggcgcgactaatgtgaacacatcggccgactcctgttccacgacgttcacagaaacaaatgcataccgattgtagatttcttcccattgtccattgggatcaagcttcttccatgtggcaagatcaggagtgacttccaacgcattcaatgtgtgtattccatttgccactgcaagattcgccagctgagagccgaatgcgtcatctattgcccacattcctggattctcagattgcagcgactgcacttgttgtatcagcggctgcttagtcacggacgcactcccatactgcaccggattcacagacaaacctgataccaacagcccaacggacacaattggcgccacaactgtgcgagcaattacgccgttattcaggacagcgaaactgagcaaacccgctatggcaaaacacaccacgaccagcagccgcccaatgtacgagagatacatcgcatgattagcccatgccaatatcgcggcaaacacaaaagtcaccagtaatgactgcttccaagaaagtttgccatcgataatggccgccgcacgcaccaacactgcgatattcgcaacgcccaaaaccaccacgcatcggccgctagtcacagaagtcagcatcattatcttagaaagccaaagcggcatacccacgcaggcaaatattgagaacaacgctatgactgtaataagccaggcactaagcacatccacttttttgcgctttatcatgccgaatacggcaagaattattccgagcgggaatagatctacgaaacgtgatgcctcaaccatatttgttgttacagagtcaacgacataatccttgaacgggaaaaagagagtgcccacggatgatatcagcgacagagggggcaaccctcctccgatggattgccttgcgcccggatatgccgtgtgcagcatggattgaatcgtgccccacgaagtcaccactgcagagccaagaatcacacagaataaggcaatttcgcccacaaaaatcagggcgtctttccttgaaattcgaatatgcccccaatgccgtatgacaatataaagaatcagcaccgcaagaagataacccagagagatttgccatgcgggatacaaggtcagtgcaaacatcccggcgcatatcagaatcactgcggcatatgcggccctatggccagactcggtatcgccaagatatcgatcaaagcacacgatggacacgaatattgcgataagcatctcaggcagtgcgttgactgcgaaccaccattgcaccaacggggcacatgcaatgaggattgcaccaacgaacgctacacccttgtgtttctcctgccggcgatcattgctgatgcagaggaagaactcatatgcggccaagaaaagtaccactaggcgcgcagaccaataaaaagcaagtcctcggctgctgccgaagaggatatacccccaatggaacggcctaaacaactcggcaagagccagtacaggtgcatccttgacgatgaacatgtccgccggtttattgccaaacaaatcattaaagtagctatacccggagtagctttgcgaaaaagccagaggagtgcccaccacatattcgtcggttcgtattatgcgaggggttccccataccacgtccgtagacatgtcatgtcccagccagtaattccacatgcctatggatgagccgctaatattcaacagcacgcaagccgctatgacacttgctccgagtatgaagcgatggcggtgcatccacatacccaccggcttcacgccaaaagcaatcatggcgccaatcaccagcagaggcatcaatatcagcaggaaccggatgcacagcaccggaacagactccgttgaagcaacaggagccagccgaaacagacgttcgcgaatgcttggatacgccgacataaccatgcttgacgccactgctgcgcatatgaataccgctatcaggcggataagaaaacctcgggcagcaagaggtgatggcttagagtaacgcgtcccttgcagtcgctttgttgccaaaatacttccttaagtgtcgcacacgggtactggccaacaagtatagtaaccaccatgttcgagaataatcagccttccgttgcggtgcttcttccttgttttaacgaggaggtcacgatcggcaaggtggtgcgcgacttcaaggccgcgctgccggatgctacggtctacgtgtacgacaacaactccaccgaccgcaccgccgagatcgccgcagccgagggcgccatcgttcgccgcgagccccgccagggcaagggcaacgtgatccgggccatgttcgaggacatcgacgcggacgtgtacgtcatggccgacggcgacgacacctacccggccgacgcggcacccgccatggtgtccaaggtgctcgacggctacgacatggtcatcggcgaccggctctcctccacctacttccaagagaacaagcggcccttccacaacttcggcaaccggctggtccgcggttccatcaacggcctgttcaatgcgcatgtcaccgacatcatgaccggataccgggcgttcagcttcacgttcgtcaagacctatcccgtgctctcgcgcggcttcgaagtcgagaccgagatgaccatccactcgctgaacaacaacctacggctctacgagatgcccatccagtaccgggaccggcccgccggatcagtatccaagctcgacaccgtgggcgacggtatcaaggtcatgagcaccatattccgcatgatccgcgaatacaagcccctgcccttcttcggcaccatcggccttctcatcggcgccatcggcatcctgctgtgcgggggggtcacctacgagttcaccaagaccgggctcgtggcccgcttccccacgctcatcggcgccatcatgctcgtcatcgtcggcctgctgctgttcgccaccggcatcatcctcgacgtcatcgccaagaacgaccgcaagaccttcatcaccgacaccaaccaattcgcatacctcaggcgacacttcactaagcgtcaacgttctgaatagagtatggaaacgctcttatatactgatgagccgtccgcaactagattgacttgttgcggacggctcatgaatgtgtaatcagtgtctattggtcacactcactgcactcgataccaatgcggtattttgtcaccaggctgatacgagcactggtacaaatctccatcttcgctgcgcccgtattggcctgcttcaatcttcttgcaccatgcaccaggggtaatggccccgggaaccgttgcagggccagacggccgcgacggagtggacggctgcgactgagctggcccaccaagccctaatgcataccaagccaaaccttcatcacgccaacccgcacgaaccagtgcatctctctcattgctattcaacgtgtagttatgagcgccggctttggcattcggattatattgacggtacaacgggaattcgttcgtcgtatcggcagaataccagccgataccctcataccgccaacccttcgagacgagcatgtccttctcgtagctgttcatcgtgtagtggtgatcaccggcattggaattatatagacggtaaaccggaaccgatgacgtcaccggagccacccatccgacaccttcatagtgccagccaaggcttttcagattatcccgttcatagctattcgccgtatagaaatgctcaccggaattcggattgtacatacgatacatctcttgggagccctcatccgcatatgccacatgcgcagggccggagactgccatcgctatagatagcaccatcatcaatcccgaaattacggcacaaattcgcttcattgtgattcgcataaccactcctcacttcgattattaagttttcctctcaccaccatgatagatgtgtgccgcttgccaacacacggatagatacctgccgactattcacgatgcaatttcagtgagcccactgccagcaacaagccaacgacaatcatcggttgcactagtccaacggtattgaagaaatgtacacgtgctgcccattggtctgcgtcagcagctaaatactctacgtaccaagcaacgacgaaagagtatgccagaccatatatccataggcacaatgccagaatcacaggaagcacataggcgtgcattcgccggcgtaattgcaatgccaaacgggcaatggcaatcaatgcagccagcgccaatccaaagttgatgcaccgatatattgtcagcaaacgttgtgcgcaccgctgcgcatgttcaaatgaaaaccatgagaaataatgcggattgggattatgtgggtcgatattcaattggttcaggccaatgaaattggcattctcatgttccggcttggtgtcgttatgtttcaccgccaaacggtactgattcagagaaaaatacgatccgtaataccgtagggtcggcccaatcagactgaatatttccggcagcgttcgcggaaccagagatgaggataaagagattttcgaagtgcgccgtaaagttccactttggaatgcgttgtccaagtcagcattgactttcgaaaagaaaaattggatacgccgctcatcatgccaccccatggttgcatcaatcgcatcaatcatttgccatgataaaaactcacccttaagtggatgtccgttgatatccggtgccgcaaacccgctgtgttccacataatgctgcagaccattaacggaccgaagcgtcggagaagcggcaaacgcctgatcaatggaattctttggagtccaaatcaccggcgtctggtcagcagatcggatttgatacacacgctgcatgaaccccgcgaatgcaccttctgtgcgggtattcaacatcgataccccaaaatgcgttttattgacatgcttgatgccggcaatacccaaccacgcgctacctgctggcacaaggcataaggccacagcaagcacaccggctgataccgatttcacaccgtttttgagagtaatcgccagtttgagcatgatcactacgagaaacataggaaccagccacacggaatcctctttgaggtcgtacacgaaggcgaaccacaatcccaatacaataaggtctgcaaccccagccgctgaccgcaggatatcgtgcttcaatcgtatgccgcgggcaatgtgcattttctccaatggagcagcgagcaacaacatcagcaatgccaaaagaataaacatcgccggagcaaacaacgagtttcggtagactctaatgccaatccaattgtcgaaagcgagaggattccataagacgtacatataggcgaataggcttaaccaccgtttgtggaataaccgccatattgcaacagccaccagcacagcggcaacaaaccatatcaggaaataagccacatcaacattgatgcccgtgccggcgatgaaccgaagccacaaactgtagccttgattcttggccagtttgtatcttccctgcgactcaaaatatccgggaagcgactgatccatgaggagacggtcatcggccatctgatcccacgcataccacatgtgcagcgtgagcgacatgaccagtcggaatccagtgcaaaccgctaagaagaatgcgacaacggcgacgcatattcgtggcatcaataaatatgcaccacagttccgctcggcaattgctggtagaaccactgagcgtcgggaatactcaatcggacacacccatgcgaggcgggctgacctagcttatagccttcactgacgatgtattgaccactcgaattcgtaggaaccgaatggaagagatacgtgttagtgggctcaaatgcaacccagtaattggcccccataccctcgcgtgcattgtagaaggaggaaccacgattcccaatacggaaagttcccctaggagttgcgttgttgacgcctgttgaagcaatcagcgtgtagatcacattcgagccgcttttgacatatacacgttgatcggcaatcgacacattgatactcagattcggcgttacgctcaggttcgggtacgtgccgccggatgggcgctgatattgtggcaccggggccccctcaccagggccaacaccgtaccaagccaatccttcatcatgccaaccagcacgcaccagcatgttcttctcattgctatttaacgtgtaattatgagcgccggctttggcattcggattgtactgacgatacagcggatagcttcgattggtgtcagatgaataccagccgataccttcataccgccaacctttcgagacaagcacgtccctctcataactgttcagcgtgtaatggtggtcaccggcattggagttatacaaacggtacaccggaacagacgattgaaccggtgcgcgccaaccaataccctcgtacacccagccaacgccagtaagatgatcgcgctcgttgctgtctgccgtgtagaagtgctcgccggaattcggattgtagagacggtacatgtctcgcgagccctcatctgctgaggcctgtggaataggtggcaacagcactgccataaacgccgccataaccgctattacgacgaatgcatgcttagtgatagtccttctcatagcgttccacctctcaagtcttctcagactccatcatagaacgatatgagtgcgagcacaccgctcacagcaagcaaacagctgaacacaagacaatcacagagatgtccaggcaacgccttcctgatgccatccagccctgccaacaagcacatactcgccatattccgtggtgaaaacatgctcaccattgttcgggttatacaaacggtatacgttaatggatccgccggaaggcacgtaccaagacacgccttcatcgtgccaccccaaacgagccagattgtctcgctcgtaactattcatcgtgaacagatggtttccgtcattcggattgtagacacggtagacaggtatgccggattggcccgctctaaaggcggttttctcgtatcgccaccccttaccaaccagcattatgacttcgttgtaattcatcgtgtaatggtgcaatccgctgttgggattgtagacacggtagacaggaaagctaggagccgaggacgtggcagtttgattaccaaacgcattcaaatccacggtgccgctaatgccgctcacgctgcccctgctggtgtactgccagccacggtcgttggtggggaatgccgtatagcccatcgaggaaccatactgcgcaacccaacgggtcttagagtggatattgccactattgagcgcagtattcagataagaagtgtatgaatacacagcaagattgttgtatccagcggattgcaacctgccataccaagcattgacaatgccgtcatacgtcccagggtcgttgggcacctcatgacccgtccaggtccacctctctaagtcgtaatacaccggatagcccaaatcgcttgagctcacaccggctttctgcagcaggttcactaaactggatccctcagcagcaccggtattggcgtcataagcgtacgaatagaggtatatgccaaacggaatacccaaacgcctgcactcgctgatattgcgaagtgcctgcttgtcgaacccattgtcccacccgtagccaatgcgaatgattgcgccttccacgcctgagttcttcacggcctgccagttaatattgccctgccaagcagaaacatcaatcacacctttggcctgctggacaaacagattgtttgacgcgtcgaaaaacgctgccgtaccgttgtaggagccccagtgagcaccgtattcattgttctgcaatgcggcaagtcgcactgaacccttggtagtggccttggccgcaccattcgtagcagttgcactgtccgaagcgttacctgcggcttcgccggaatcagaagtactcgcagaatccgacggggcggaggaatcggactgattgggctgttcagactcactcgaatcattaggccgggtctgctcgggctgagtatcagacgtgtctggagcggtctgcgcatcagccgctcccgcattcgcgtcgccgccgttggccgcaaccttctgtttgacctcatcggcttgtaccggaataaacgattcaccgtcagtcttggcaagcggatcaggctgagaatcctgcgtacccacaagcgcaggatcagtcacggtctcaccggtggtgatgttcttcagttcgccgtcggcggtaacggcatgatcttcggagaccacagttgcatcgtccggaatcgcagcagaaacctgatccggcaaggcagcgtccgggttatccggcatggcatcagcagcggtgtcatcggagattgtctgtgtcctgaacggatccgtcgacgcatctgcaagcgcgtccacgctcacatcgctcaatgcactagccggtgctgcgcacaccgcacttaccagcgtcattgacgcaagtaccgcaaccgcactcatcattctcttcgctgacataagcgtcccttaccgtttcttatttccgcaccgagtatttagacattcataccagcaatgctctatttgcgtccagcaagcacttcgcttgcccgcacaccacagtcaagtcaccaccatacccggcacgttgcataaaacagaaccagtgaccttgcctcagcaaattgcacgcaacttttcccgcaatcgttacgattcgagcgcggcaagcaaagcacggtgagtcggaacctgaggtttgccatgcgagctgtcaatagtgttaataagtgctagtaagtcacaccgcagtaggtcacttcgatgtaccggttgttcataccaatgaactggccagtcacagaactgcggattgctccggtctcaggatcgatgatgccgccggtctgggcgtcaatcaaggtaccgtcagcctgggtgatcacgccgatcttttcgttgtaggtggaactgtcggtgacagttccgtcagcagtggttccatcggcggtcgcaccatcagcggtcgtaccgtccgtagtggtagtgccatcaacggtggccgctgtctcggccttatccaccagcggctgccccttgcgcaacttctcccacacggcatctgcaccgtcggccagctggctgcgattgggatcttccacccacggggtaatcggaatcgtcatggaataaaggttatccatgctgaagttcttcaagctagtagccagaccagccaatgtacctacattagccaggccttcgctcatctgcaccgagtccagcgccgactttgccagctgatacagctcgctcgtctgtgtgaagtagttcttagacaatgccgtcttcaccagctgcctgatcagatactgctgcctcgtggtacgcatggtgtccgagccgtccgtgcccgtaccgtggcgcatacgtgcatattgtgttgccaggccaccggtcaaatgctgcatgcctggggaaaggttcaatccggtgtagacatccgtcatctgcgtagggatgcagatatccacacctccgatggcatcaatcatgttgaccaagccgccgaagtcaaccaccatgaagttctggatgtccaggccgctcagatggttcacctcgttcatggtgcagctggcagccgaggccacgtcgccgccctgcgagtagccgttggcaaaaatggagttgaacatcaccgaagactgcgcggcaatctcgccgttagtggtctggcagcccggagtggagaccatgagatcgcgcggtatcgataccagattcatgctcttacggtctgcggcgatctgcagaatcatcgtggtatcggaattatgcagatccgcaacgtcgctgccgctaccgccaatcgcggagttacccgcaccatcacgcgtatcctgaccaatcaacagaatgttgattaccttattggcatacggatccaccggtgagtcatctactttcttggcacccttctgctggatgacctgcaccttctggctgctgaccgcgccagacacatcggcccaagtggcagcggcgaacgttcccacaaacaccagcacggcaataacagccatggacacggctgcagcggccttgcggctcgtccggtatgccatgatgtgatgggggccgcgcaccttctgccaaccaaaattgggcagattgttctgtgcgtgccggttcgccatatcctttgcctccctgtttcgcaagacggatgcatcaggcatgtgctgcaaccgtccaagacgagctatgctcttgccgatatcgaggccgttccgcactgcgcggcagcctcacaagagcacgtcgactctgcgaataataggtgttatacgtcgtgggtaagtgtaacagaatgcgatgaacctattcctgatacgacgaatcgcaacagaatttccatgttccgcgcgattatgcgcagttttttgcatcgcttttacccacattgaccatgtttgttcccagcgcattcccagacttcattgaggggtataacagtattgcgcaagaaaacggtcacgaagcgcaacaatagtagagccgtattgatttgttcggcttaggagaacgggagaggtacacatgttcgtcctcagcaacgcctggcgggctttgatgcgttccaagggacgcaccaccctaaccgcgttcatcactctggcagtcacgttcggcacggttgccggactggccattgtgcaggaaaacaccaccgcacacaccaccacatacaattcgcagaaagccaatatggcgattcgcccgagcgcggccacctggaagaaggtctccgccaccgactcggccaccaccaagcattacatgacctggtcgtcgtacaccgattacgcctcggctattcagaccgccggtaccacgctcgacttcaccgttaccggaacagtacccgcccgcgtgagtggcgatttgaaagcgctcgatggcggctcgctcggctccgcttccgacgataagaccggcggccagctggtttggcgcgcattctggaccaaggacgcggccaaagcaagcgatcttggcacctttgaaatcgtggacggcaagggcctgagctataacaacaaatccgccaacccagacaccaccggcgcattggtctctgaagcgtttgccaaggccaataatcttaaggtgggcgatacgttcaaggtagccactgccaccagcgcatcagacaccgcagagctcaaggtgcgcggcatctacaagtacacctccgaatccaccgtggacaacccggtggttgccgcccgcaatcgcgagaacgcgatcttcacgaactaccagaccttctccaaggccggactcgacccgcagtacagcaatgaaaccgcctccgggtgggagctgcctgacctgaacgtggtgttcaacgtcacggattctgctacatatgattctctgctgaaaacgctgaagaaagccaagctgccggccaagggctacaccatctcttccccctcgctcgaggcttacaccaagtcgcttgagccgttggataccttggctgctcgtgccaagaccggcgtgatcgtgctgctcaccgtgggtggcgtgctgttgcttgccctagtgctgctggccgtgtggacgccgaagcgcaatgatgaaatcggcatggcgctggtttccggcgtaactcgcggccgccttggctggcaattcatgcttgaggtgttcttcgccaccctgccgttctatgtgattggcctggtcggtggtgcctttgcggcaaagcccatcggcgcggcattgacctccggccacattaccgcagtcacctccagcctgatttggcaaatggtctggggcggactcggcaccatcctggcgctggctattctggcggccttgcgacttgcgttcttcagcgcagccaagctctttgccgctgatggcgactggggcacagtcagcgaaaccgagaccattgaagaggctgacgacgaggttgccgaactcggcaaggctgtgacccctaccacgactacgaccaacgacgatgcggaggcgaaggcatgagcgagaagaacgaacaggaactcagcaaggacgaagccctgaagaacacggccgaatcggccatggcatccaaggatgccatcaagcccgctccggccgattccatccagttcagcgtcatctttgacgatgcggatggcctcgacctcgagggtgcggatgacgccgacgacaatgcctccggtgatatctacagcatcatggccagcgccgaaagcgccgcggatgtcactgaggcctcagacgccaccgccgaggacaacgcgggcgcagaactcagcgaggcagaagcggacgctctggcttccgcagacacctccgccgcagcgaccaagcgcaatgcggaccgcgtcaacgagacgctgaacctggctaaatctggcggcaaagacgaattggtcgaacacgcagcgccggcggccaaggccaccgaaccgaccatgacgctcgcctcgcgcatcgatcgcgtgctcgtgggcggcggcgcggatgacatcctgctcaagaactacccgacctttgcgctgaacaaagtcaccgttcccggcgccaaaggcaagatcaacgtactcgacagcgtggaattcgcctgctacgcgggtcacgcctacgcactgctcatcaccgacgaccctgactcgggactgaccgcagacaccaagcgccgcgcgcttatgggcgtgatgagcggccttgtacagccgaagtccggcacggtgatgaataagagcgccaacatcgccgaactggagcctgtggatctgcgtggtcaccgtctgggcatcgtgccgcagctgcacgccgtgcagcccgatctggacgccgagcagaacgtgctctatgccatgaatgcctccaaccgtaacttcctgaagcccaagccggtgatcgctcgtgaactgctggccaaggtcggcttctcggaggcgaccagcggcgttgccgtgagcaagctacccgtggtgcaacagcgcttggtggccattgcccgcgccatcagcacggaagcggaagtactgattctcgacgaaccgacccgcggcttgaacgtggacgacacagtgaccgtgttcgccgcccttgccaagctggcgcatagcggcgacccgaagcactgcatcatcgtgctcaccgcctcgcgcgagatcgccgaagccgcagaccagatgttcgagatctgatttcaagtcgtcgagaaggcccctgcgattcggcaatatcgaatcacaggggtcttctcgacttcaaggggctggtcattcagtcaaacgcatgtggaaacggcttggcgcaacgccatttcgccattgtcggacgttgcctacctagacaccagcccctcgaaacgcaagtagatctccggagaagatcgaatcagcccctcgaaacgcaagtagacgtcaaacaaggcccaaatctgttcccgctgacatcaacgtggcttattcccgagctaatctagggataatcctgaccttacgaaacgaaacttgacgatcatgaccggatatattcccacacttgagcagattgacgagctgcatcgcaagattgcgccgtccgaggcggcctatgagctggttcacacgcattgcgtgattgtggcaaccatcgggtgccagattgtgcgacggcagaatgcactgttcacgcgtcgttgcacgctgccgaaagatgcacccgagtggggaagcaatcgtcgcacagagaatacggtagatgctgctgtgtcggctacgcccatgccacccactgcgggcgtcacgggcggccaggtgccgccacgcctactggacgagcatctggtgctcatcggcgggctgctgcacgatatcggcacgtatcgcgtattcaagcatgacggctcggacggcgaaccgctcaaatttagcaagaaacgatacatcctgcacggacttaagggttatgagtatttgctcgatgagggtgtggacgaatccatcgcccagttctgccgcaaccataccggcgtggggctcacgtgcgaggacgtggtgaagcaggagcttcccctgcccccagccgactacgtgccgatgaatcttgagcaggaagtggtgatgtacgccgataagttccacagcaagtcggtgccgccgaagttcctgcaggtggaggcgtacacggctcgagccgagcgatttggcgaggataataagcggcgttggctggatctggtggccaaatatggcgtaccggatattccggcgttggctgagaagtacgggatgcgagtgatctgagctcccgctggcgggggctgtcagcgaagctgactgggggtggttcgtttccaccaatcagaccaccctcagtctcgcttcgcgagccagctcccgtcagcaggagccgaggaacggtcgaggaacggttcagatggaacgcagacggtaggtaccgttgcggttggatgcgatgatcatctgatcattctccagcacgtcccagccttcctgctcatatccagaggaagacaccactacaccggccggatcgccattctcgtcattcagcgcgcggtagcgcatcacacggtaatcggcggcctgctcgccgcggccatactcgtcgtagatctccacaatgcgtgggctggtcttctcacggccggcggcgcacagggctatcagctgatcctcggactggatcatgcagttgtagctggacttcgggtatgcctggcgaagctcgcgcaccgcctgagccacagcctcgtcaagcgggaatccgaagccgacgtactccagaatcaccgcgaagaagatggcggagtcggagcgtccgccggtggacagaaacacgctgtgatccacggggtaggaacgattggtcacaatgttgcggccattggcatcggaaatatcgccattgtggataaagctcaaaccgttggcatagaacgggtgctggttctccataatgagcggcagattggagctggccagacgcagatgccaaatggcgccgcgagccggctcgctagccaaagcttcaaacgtgctatcggcgcgtgcggcgatggtggacttgtagattttcgtgccggtttccggagtgggtgcgccaccgtcgcgcatgtatggcgccgatgtgggatcagcgagctgggccacaccccagccatcgttgtggatctcggacaattcgcggaaatcctcgacattgccctgacccaacacggcgttaaggctcaggttgaaccctgccgtcgcgtatcccaataatctgcacatagtcagataacttacccgagccatatttcgacgtgcggccaccgttataggcattctttatagagcgcgtcaggctatacacggcggtaactcagttgaaaagggcacattgcgacttctgcagaatgctaactgctttcagcaggggtacccgatatggaagagcccaagtacaaacggcagaataacgccattcatacttgggttctcaacacttaggcacccctctgaaagcagttattattccgcaagagggttcgagcacccctttcaaccgagatacctactttttctcctctgccgacatcgcggcatcgagttcttggaccaagcggctcaggccggcggtggtatccatgggatcgggaacagccgcaggatcggccacgcttcgagtcggggttggcgcaggaaccgtcttggtcccatccgtgcgcttcagacgcggcgggcggcgggtggagacgaatagcggctgcacttcaatcaacgggttgtagggcgccaagccgaaccacttgaccggagaaccggccacatggcgaatcgcgtacttggcttgcagcgagagcgcaccgcgagcggagaccttggactccggcatcagcgccttgtgcaccagcacgtaacgaactgtgccaatatccgggtcggcgtccaccttggggtagatcgacttctgcttgggcagttctccggtcttggacaggtcatgcatgatctggtgaatatacgccggaatggactgcgagaccttgaaccccaggcggaaccgcacacggaagatgtagttggtgccgaaattctccaccgagtattcgcgggtgaacggctcatcggtggtctccacactcactgcccaccatgcgcgggcgcgcttggggtggtcggcgaagatggagaagaagatatccgtatcgagtcgcttggtctccgaatcggaagtcaggtagacgatgttgtccgcaaagtaggggatgcggaagtctccgtgcagcttgtcgagggcgggcaggaagtccttgggccgcatgtggcgacgctgcgcacgctccagcttggtgccttcgttccacgtgtacatgacaaacagaatcgcgatggtgagcaggcaggtgaaccaaccaccatgcaggaacttggccatggaggcgatgaagaacatgatctggatggccaggaacagcacggtgaacacgatggcgcccacgcgcttgcggtcataccagagatacacgccgagcagcacggtggtggtgatcatggtgatggtcagcgccaagccgtatgcggcggagatgtgctccgaatccttgaagatggcaagcacggccagagtggagacgcacagcacgccgttgaccaccggaatgtacagctggccgcgtgtacgggccgggtaacgcacctgcagatgcggcatccagttgaggcgggtggcctcggaaaccatggtgaatgcgccggtgatcagggcctgggaggcaatcacgccggccgtgacagagagaatcaccgccagatagcgcacgttcggcgtcatcatctggaagaacgggttcagcgacttcatagtgttgaactgcgggttgcgggcgttgttcagcatccacgcgccttggccgaagtagttgagcaccagcgcaatcttgatgaatggccaggtgaagtagatgttgccacggcccacatgacccatgtcggagtagagcgcctcggcaccggtggtggagaggaacaccgtgcccatcagtgcgataccggccgcgttatgcgggctgaacaggaatttgacaccgtacaccgggttgagggcggcgaacaccgaccagtcgttgttgagattcaccacgcccacaacggcgaggaagctgaaccagaccagcaccatcgagccgaagaccttgccgatgctttcggtgccacgagactgcacggagaacagaatcacgatgatcaccacggtgatcatgagggtcaggctcggattctcgtcaaacagctgctcgagcggcggcaaagtctgcagaccttcgactgcggagctgatagacacggccggtgtgagcacggaatcggccaggaaggccgcgccgccgagcatggcgggaatggcgagccaggctccgtatttgcggatcaacgagtagagtgcaaagatgccgccttcgccgttgttgtcgatgcgcatggcaatcagcacatatttgacggtggtaatcagcgtgatcgaccagaagaccagtgagagcataccgagcacggcctcgcgatccacgttgccgaggccgccttgcccggcaaggaaggtctgcgcggtgtacagaggcgaagtaccgatgtcgccatagactacgccaagggccacgatcgccatgccccacgtgaccttatccggtccggattgcaggcgagcccaccaacggccaagacggcctttggaagaggcgctggcgattttctcggcttctcgcgtctcggcctcgcgctgtttggcgatggcctcgcgctcctccttggtgagggtgcggcgggaaaccttgggagcgttagtgaaggtgtcggccctcagcagggcttcttcttcctgcttagcctttgccttattggcaccagccttggcattagttttctgggccttttggggctttgccgctttttgggcacgttcagcctgtttatctgactcagccatacgttcagtcctccattgaggtggagatcctccccctcgcttatgtcaagcaacatatcgtagacctcgttggcgattcttacaaattctgctcaattccaagtcaacacagcgccacaaaaggggcaaatcaacacgtcattgcccacttctgcggcctgtgcggcgcatcccaaggaataatggcagcgagctcgctcacaccccgtagaccacacgggtggtgttgcgggtgccgcgggccacatcggcaatgggcaggtcaagcgtatcggctatggcacgcagtgtgtaaggaatcatgtagggtgcattggtgcggccacggtacggcataggcgtgaggtacggcgcatcggtttccaccatcgcgtggtccagtcccacaatgcgcagcgattcgcggatgccatcattgcccttataactcactgtgccggagaagctcaggtaccatccatgctcgcgcgcaatctcacccatctcgcggtcgccggagtaggagtggaacacggtacgctcgggagcgccgtcggccagcagagtctcgatgacttcgcgatgagagtcgcggtcatgaatctgcatgggcaggttcagttccttggccaaagcgatatgcgcgcggaaagcctcacgttgcagctccttagccccctcgccggtacggaacaggtccatgccggtctccccgatggccaccacctgttcggggtacgtggtggcaagacgatgcacttcagcgagagcgtcctcaaagctggtgtcgtggtacggcttgtatttgagcggcagcccatccggccccggcacaccgcgatgaccgtggagcacggattcgttgggatgtattgcgagcgccgcgtgcacattacctggatgatcgagggccatctggacggcggtcatcaggtgcggcagctcgcaaccgcagtcgataatacccccaataccgacggcttgcgcctgtgcaagcaactggtcgacgtcgtacaccgggacttcgggctgccctttttcctgcgcctcgtggctcatggcccgcgcaaacggtatgacggaggccacgtgggtgtggttgtcgatggtctgggcgtcttgcggcagcggttcaggtgccggtgcccagctacggtcgcgatggtggtgcttgctcatagctccccagtgtaggcagacaccctaccgcgcccatcaccgcctcgatgcccttcccgaatatgtaccactgacaacgtcgtagcgtcacatattcaggaagcaaccccacacctcccgaattcgtactactcagtaacggccagcagtacaaattcgggagatttgggatatggggcagctacgggtggccgagctactcagtagccccggtggccacgcgaatcatcgcgtattgggactcgtagaggcggtagtacgcgcccttggcctccagcagttcggcgtgcgtgccgtgctccacgatctggccgtggtcgatgtagaagatctggtccgcgttctcgatggtggacagccggtgggcgatgatgaagctcgtgcgacccttgagcagatgccgcaagccggcctgcaacgcctcctcggtgcgggtgtcgatgttcgaggtcgcctcgtccagaatcaggatgcgcgggtcggcgagcagcacacgcgcgaacgcgatgagctggcgctgcccggcggacagggtcgagccgcgctcctccaccgtggtgtcgtagccatcaggcagctccatgatgaactcgtgcgcgtgcacggccttcgccgccgcctcgatctcctcgtcggtggcgtcgagcttgccgtagcggatgttgtcacgtacgttgccggagaagatgaacgtgtcctgcagcatcacgcccatctgccggcgcaacgattcaagcgtcacgtcgcgcacgtcgtggccatcaatggtcaccgaaccttccgacacgtcgtagaaccgggacagcaggctcacgatggtggtcttgccggcgccggtcgggccgaccaaggcgatggtcttgcccggggtgacgtggaagtcgaccaagttcaggatgttacggccgtcgtcctcgtaccggaacacgacgtcgttgaaatcgaccttgccttgaatggcgggcagctcggtggcacccggcttgttcgcgatctcgggcttgacgtccagcgtctcgaagatgcgttcgaggtaggcggagcaggtgaccagctggttgtagaagttgccgatgttgatcaccgggttccagaagttgttcgcgtagcccacgaacgcgataagcataccggtggtcacgctcacgccgccgaagccggtgatgcccacgaagtagatgaacgcgatggtcatcacggagatggtctgcacgcccggccacatcaggaattcaatgtgcttggcggccatccaggcggtacgtacgtcgtcttgctgctgctggaaggtgtcgaactgctccttctcgcgggcgaaggtctgcgtggtcttcacgccggcgattgactcgtggatgaaggcgttcagattgctctgcttgttggacagcacctgataagccttgcgctggaagtactgcagcacacgcacccagatgatgagcaccgggaacagtacgaggctccacaatgccagctgccagtcgatggcgaacatgacgatcagcgtcacgaagaatgtgaagatgtcggagaacacgttgatcagacccgaggagagcgtgtccgaaagggtgttcacatagttgaccacgcggatcaggatcttgccgtgcgggcgcgagtcaaagtagctgaacggcagggtctggatgtgtgtgaacagatcgcggcgcatgtccttgagcatgagctggcccacgcgagtaatggccaccgtgcggtagcgcagcgcgagttcgtagatcacgatcaggcagaacagcccgccggccagcatggccaatttgccgagatccttgttcggaatcgcgtcgtcaatcataatcttggtcaggtacgggacgctgaccacgatgcagctcatcgagaccacgaccgccaggatgcgcacaatgcgcgaaatgtacggtttgagatatttgccgacgcgagcgatgtcgtggaggttgatggactcctccagctcctcatcctcgcggaatgtattgcgttgtgccataagtcctcttctcaagccccctccggcgagggggctgtcagcgaagctgcctgggggagagatatgtcgtcaaaatctctccctccgtcatcgcttcctttatttattgctcacctatcggttcgccctcgcctaaaaacagcccacagggctgttttcttcacggctcagccctcgtcagagggaggttgaacgacggttaaaacccctgtgcggcgccggactggagtccgagctgcttgtggtagatgccccagtagcggccgtgtgcggccacgagttcggcgtgggtgccgcgttcgacgatgcgtccgtgttcgagcaccagaatcaggtcggaatccttgaccgacgagatgcggtgggcgatggtgacgatggtcttgccgccgtccatctccttgaggtgcttctggatctccgcctcggtctccatatcgacggccgaggtcgtatcatccataatcaggatcgacggatcatccgcgagcgcgcgggccagcgacaggcgctgtttctgcccgccggacaggcccacgccgcgttcgcccacgacggtgtcataaccctgcggcatcgacctgatgaaattgtccgcgccggcgatctgggccattttctggatatatcggtcgtcgctatcatcgctggcaccaaagccgatattgccaccgatggtgtcggagaacaggaaggtgtcctgcgccacgatgcacacctgcgagcgcaaggtggccagcggccagtcgcgtgcgtcgatgccgtcgatgagcacatggcccacggttgggtcgtagaagcgggagatgaggctgacgagcgtggacttgccggcaccggtctcgccgaggatgccgagtttggagccggcaggcacggtgaagtcgaggtctttgaggatcggggtttccgggtcgtccgggaaggcgaaactgacgtgggcaaagcggatgtcgcctttgatgcgcagcgggcaggacttgcgttcggcggactgctgggcaccggatgttccggaagccccgggcgccccggtagcaccggtagcctcatcatcgcgcttgacctgctcgacgattgtgaccgcctgcttgacggcttcggccgcgtcgggcttctccacgatgcgcggctgttcggtgagcagcttgcgaatcttgatacagctggcgttgaatcgctgccagtcgttgatgagccagccggaggcacgcaccgggccgtcgatcatccacaggaaggagttgaagctcactaagttgccaagggtcatgtagcccttgatgaccaggaagccgccgaggccgagcgtgatgagctgcagcgaaaagccgaggccgtccagccagggcatgtacttgcgcgagttgtaggccagggccatgttgcgctgcatgtagtcgtcgttgtgttcgtcgaacttttcggtttcgtacggttcgcgcacgaatgccttgaccacacggttgccctcgatgttctcctcgaccatggagttgagggaggccagcgagttgcggatggcgaagaacagcgggtgggcgtgcgtggacaggccgcgcgtgagcacaaaaatgaacggcgtgacgcaggccagggcgagcgcaagtcgccagtcgatggcaaacatcacacacagggcaccgatgaacatgaccacgcagtcggcgatctggtagctcacccaactcaggcagtggcggatcgcgtcggtgtcggaggtcaggcggctcatgatgtcgccggtgcgtgtgtggttgaagtacgtgaagtcgagctcgtgcagcttctcgtattcgtcggagacgaggcggtagaccgagttctggccgaaacgctccatccacatctggtagccgtatcgcgcgcccacgcggatgatggtcatgaggatcatcagtccgcacagacgtggcagttcgtcggtatgcccgccgacgatgacacggtccacaatgatgccggacagaatcggaatggtcagggccatcgtgttattggcgatgaacagtaggagcgcgcctgccacgcggggcaggtctggtttgcagtatggcagcacccatttgaggttgcttgcgctggtattgattcccggatcgacgtacatgtgaggagatcaccgtttcttggggattgtttgcttgtggtatggtgcggcatgctcctgcgccgcacgcggcaatcgctgccgccacgattcacgatcagccgtgcttcgtactgcgacaatcattggcgattggtcgcacgaccggagctctccttcaccggtcgaagcacgttcgactttcgtaaacgcgtactagtctaggcggcttgcgtccaatcgcaacagcccgcaaccctgcgtgttccccgcattcgcaacgatacgcggctctctaagcgcaatattccccggaatgcgtcgcgaaacgttgcgcatgcggcaatgcacgctcgagacctgttgcataccagtcgaccaaattatagaatcataattaagtaaattacgattctattctgcgaatgcaaatggcgcagcatgccatccggtctgcagcagttggaagtgctgcgcaatcgcgccagactgctgcaccccgaaaccagccattacatgctgttctccaaatcaggcttcgacgagcatgtcgccgcccgcgcggcgcaagacggtacagtgacgcttgtcgattttgcggatatggattagtcggctcactccattgcggacggtaagggtgaagcaacaggctgggtcaatggaccgaaccgctaggccgggcaacagacccaatccgcgacacattcccgggaaagtggcgcatgtcatatcacgctcaaacaacccagcatgtatatgggcaggtattcgattcggccaacagtctccacgttgccatcatggaacacgtaggcatgagcaaaccgataattatcggtatccagcaggttgttcatggcccgatgccgcgtatagtccttgcccgatttgatttcaaccagtgaaatatcatccagaccttgctgcacaacaaaatcaacttccccaatacggttctggttgaagtaatgcagttccaatccctgtgcaaacagttcctgagccgctgcattctcgaaaatcgacccgtaattcatactggatcggtgattcacaatctctaagtccacactgcgcatcaaacgggaggtcagcaaaccgacatcgttcatgtacagtttaaacgtgttctcgtcggcatgctccgtcagcgggtattcagggtcctgcacgcgcgaagtaggcaaggcgatacctgcgttcgccaaccaatcgaacgccgtctgcatatgagcgaacctgatattcttgcccaacttggagaacttgaatcgtttgttttccgcattgagctgacttggaatcgcctcgtaaatgctcttgatatgacgacgttccaccaaatcggagacatatttggtgatgtcgtattcataggtatcgaatatggcctgctgagtattgcggaccttgacaatatcggcaaaatccacgaatgactgcactgcgtcgggcatgccaccaatcagcagatacttgtaccacaggtcggtgagccgttcatgtagataatcgggaacctcccgtcgatccacataacattcacgcaacgtatcgagagcggactgaggcagccggcatgcagcgcagaactcatagaaattgagcggatacatacgcatcgtctgcaggaagcccaccgggatcgaacgcacattgaacacatcaatgcccagcagggagccagaaacgatgacatccaatcctttggcgccagccaggaatttggtccacgtgagcatgtcctcacacgcttgtatctcgtcaagaaacagcagagtcttgcccggcgtaatttccgtgccggaaagtaccgataaccgcagtatcaggtcttcggcgtccttggccttgcttaccgtttcgaccgcctgaggcatttcgatgaaattcacctcagccacatgctcataatgatctgcaccgaactgctcaatcaacgtggtcttgcccacctgccgggcacccgtgaccagcaagccctgcttggttttacggttcttccaattcagcaactggtcatatgcatggcgcttgagcatattcccctcctcttttgtggagaatgactgaaaacacgcaggtcatcacacaatcacatactgatatcatcttagcattcacgtttttacatatgcaaaacgcattttgagtcacaaaaaacacaagaatagtaagtggttcattcacgttttacgtattgtgcgacggaatcggcatctcccgcaacacgtgagatatgcaaaagtgccgcacgctgaattgtgatcagcgtgcggcactgcgcgaaacgcgtgaaatccgcagaacgcacgaaactcacgaaacagataaaacgtacaaaacgcaagcaaggcgaagacaacgaacagacagagacagacagcctacaggtcagaacgccagcgaacgaacgtaggaaccaacttgcgggcggacgggaaccaacgagccgtccgaatcataatcgagcggcgcgaataccacttcgcgatggcagccatcgcctccagcccagcgaccggccggattgtaggcgaaccggtgatacgcgataacccattcgtcactaccgggaatgttcacgatgttgtggtgacggtggcatacagcttgtgtaccgggtcttgttcgagcagtacgcgcggttcgctccagggcccatgcagcgattcagccatcgcgtacttgacgcagtattccggctcccgggcgtcgttttccgaccagctggcatagtatatgccgttgcgcttgtgaatccaaatggcttcacggaaatcgcccggcacccagctgaaagcgcgcgattcgtcgaacgacaggcagtcgtcattgagcggcgcagcccaagctatgccgttgccccacaggaagtaccgggtgacgtcatcctccacgtacacgccgggatcgatggtgtggcagtcgaacgtgcctttgcgcacaatcggttcgggatcaggcacgaacggcccgtacggggatccgcccacggcagcaccgatctgggagccagccacgaagtagaacacgagtttgccgtccgcgcgctgcaccacggaaggcgcccaagcaccatccgagccatcccaccacggcacgtcgcgcaggtcgagtgccgggtatcgctcccatgtggtcagatcgtcggacacatacacgctgaacgtggtggtgccccaattatccacaccgtcatcagtgcagtacaggaaatatcggccatcgaaaatggccagattcgggtcggcgcaatacctgtgcaatggattagtggtcagcaccgcgttattcacgcgatgagggaggccgccacgaggcacggctctcggtcttggcgatgtttgtagcacagtgccaacggtacccatgggaaatccttatttggtgaagaacatggctccccacacgccgcggaaggagataatatgagcgtagtggggagccggaattaataccgtgatcagccagccgactagtcgatcagccgatcagcccttgaccgagccggcgacgaggccggagatgatccacttctgacagaagatgaagaacacgaacacgggcagcagggcgagcacggtgatggtcatgaagctcggccaatcggtcgagaactggcccaccgcgttgtacacctgcagcacgatcgtgcgcagttccgagctggagaggaacacgttcgcgttcatgaagtcgttccacgtgcccatcgtctggaacacgaccacggtcgtcaggatcgggcggatcagcggcatcacgattgaccagaagatgcgcagcgggccggcgccgtcgatgcgtgccgcctcgatcagttcgaacggcaggctgcgcatgtatccgacgatcaggaagtagcagaacaccgcaccgcccaggtagatgatcaccagtccggccaaggtgttgaccaggtgcgcgtttgcctccatgcggtacagggggatcagcgtcgtctgcgccggcacgacgaacgcgaccatcaggatcgtgccgaccgcggcggtgaacgtggacttgcgcaggatcatgccgtatgcggccagggcgccgacgagcacctgaatcacgaccgcgaagaacgtgacgatcaacgtgttcagcagggagcggaacaccgggaccgtctcgaacgcgttgatgtagttcttgatcgtccattccttcggcaggccgagcgggttggcgctcatgtccgggatcgtcttgaacgtgttgatcaggatgtaccacagcggaaccgcgcacaccagcgcgatcaggatcatcaccacgctggtgaccgccgaaccgatcctcttgcgcgtcgtgaagttcatgcccttcggcgcggccgtgacggaagaagccttgttgcccatgatttactcgaacctcctcgagatcaggttggaaatgcccatctgaaggaacaccacgacgcccgtggcgatgaagaacaggaccgccagtgcggaaccgatgccgtactgcgactggccgatgccctgctggatgatcgactgcgtgaccgtgtatgtcgaatagcccgggccgcccttggtcatcgtgaacggcaggtcgtacaccttcaggccgcccgacatgagcaggaacgtcgaggtcacgatgcccggcatcagctgcggcagggtgatgtgcgcgaactgctgccacttgttcgcaccgtccacggtcgcctgctcgtacaggtccgcggggattgcctgcaggaacgccaggtacagggtcgcatgccagccgatctgcgcccagatcgcgatgaagatcacgcagaacttcgccagagagttgttcgacagccacggcaccggccccaaaccgaacgccgcgagcacgctgttgaccacgccggtcttcatcggggagaagatgtacttccacaccatgcccatgatggccagcgacggcaccgagaagaagaagaacacagagcgcacgaaatcacggccgacgaacttgcggttgaggatgaccgccagcggaatggcgatcacggtcaccccgaccatcaccacgatcgcgtacaggatcgtgaagcccagaccctgcagggtggacggatccgtgaacaccttcttgtaattgtccagaccgacccagttcatgtccatgctgtaaccgttgaagtcggtgaacgagaagtacgcggtctgtaccaacggcaccaggaacaggaccacgaacaccgccaggatcggtaacaggaaccagaacgacgtcacgtcctcatgcagaccacgcgcacgacgacgccgccgacacaggttttcgtccaacggcggcaggttgccgaccgccgagccttgcattgttgcgctcatatgccatcctcctttgacattggcttatgaccgaaatccgattgcgggcatgcggagggcgaccagccgcagccgacaggccgccccattcccatgcgcacggttcacgacgaaccggagattgtagttatctatgtgcgattatgtgcgatccgttacgggtcactgcgcggccgcgaccttggtgtcgatgttcttggcatactggtcgggcgtgatctgcccctgcaccagctgctggttctgcgccttgagttcgctcttgagaatgtccggcttcgaatagaagttggtgtgcaggtagtacttgccggtcttgatgtcctgatcgtagaccttctggtactgcttcatcaccgtggcgtcgaacccgtcgacggtgacagcgtcgccggcgtcgttacgcttctgcagcgcccacttgcttgacaggaaggcgaggaacttctcggcggccttgagcttgtcgccgtcgagcttcgcgtagatcgcccacgccggggaagcggagccctgcgcgtactgcgtgtagtcgtcgccgagcttgggcatcgggacgaagtcccagttcatgccggcctgttcgaaggtggcaaagtcccacgcgccgtcgacgatcatcgcgacctgtccgttggtgaactgcgtcttcatgtcgtcgccgctgatgccgaccgtgtcacgggtcacgccaccctcgtcgtacaggcggatgtattccttgacggcctcgagctcgtcggtgcccggcgtctggttgtcctgcgtggacagcgtggtcgggtcgacgcccttcttctcgaggatggatccctggaaggcgtcgatgaagcggctcggctcgtcggcgttcggctcgaggaacggctcgatgccggcgcccttgagcttcttgcacagcttgaggaagtcgtcccagttcgccggcggctcgtcgtagccgacctgcttgagcagatccttgttgtaggcgatgccggagacccacgagatgatcgacatgccgtaagtcttgccgtcgcggccgacgaagtccttgttggcctgggagatgtttttcatgaacggctcgtcggtcaggtccttggcgtagccgttgtcgatgaggtcgtcgcgattctcggaggtgatgatgaacacgtccggggcctggttgccgacgaggcgggtctgcagcgtggagatgtactcgctggttggcggcgcgtagctgaagtcgatcttgatgtccgggttttccttctcgaactcgtcgatgtacggcttggatatctgctcgttgtcccagctcaggtagctgagcttgatcttgccggcgtcggcgtcggagccgcaagcggccagcgggagcagcatcgctcccgcgcagctcagagcgagcattcgtttgccccagatcttcattgacatcgcaactctcctttgtgtcggtggcatacgtcatgttgcatgccgaaagaaaccacattgtcttccgtgcaagagcccggttttaaaccgatttaatcttgtagttgtatttatagcactccgttcaaacggtgtcaactcattgcaagaccttttaaacacaagggctgcggaacgcgcggaatcgcaccggacaacgaaaattaattaaacaaaaaacgccgcgagtcgtcccgccgatcggcgatccaccgcgaacaaccaccggacgaccggtcagcgagtgcggccggacgactcgcgcatcagcacctcataacccaccgtgacatgcttgggcatggccggcgcgccgcaacgcccttcctcgatgcgctcgcacaggatgtcgacggcctcgcaggcaagcttgtcgatgtccaccgcgatcgtgctcagcgtcggcgcgctgtacgatccctcgcgcacgccgtcgaagccgatcaccgccacgtcgtccggcacgccgatgccatgctcgcgcaacgcgcgcaacgcgccgaaagcgatcgcgtcggtcatgcagaacagcccgtcgaacgggaagtccccctcctcgatgcgccgcgaaaccgcgcggtacgcgtcgtcggtgtcccagtcgaacagctggatcgtgtcggccttggtcagcgtgcgctcataccgctcgaacgcgcgatggcagccgatcagacgtcggtcgcccacgtgcatcgaccggcgcgcctggtcggccggcatggagtccgcaccgaccagcccgacgcgctcgcaccctatttcgaacaggtgcgtcaccgcggcctcggcgccgttctcgcacggcgtgaacaccgagtcgaatggcccttggtacgactggtcgtcgagcagcaccaccggcttgcccttgctcagctctatgatctcggcgtcgctcaggccgcccgcgctcaggatcacgccgtcgcagaaccggttggcgaccttctcgaggatgcttttctcatggccgaccttgccggtcgagatctgctgcgccacggcctggatgccgcggtcgagcgccgcgttcgacacgctggcgagcagctgcgcgtagaacggccggtcaaactggaaaacggcggcctcgatcacgccggttcgccccgaacgcaggcttttggcaacggtgttgaccgaatagttcatccgattggccacgtcgatgatgtgccgtgccgtttcttgtttaattctgggatcgccgcgcagggcgaacgacacggacgcaggagagacacccgccgccttcgcgacatcacgcatcgtcaccgccatggcgtcctccttaggtatttatgggcttttcggcatctcaccgagtagctgccgacaccttcaatcatccatttgacgaagacaacatcggcgcacataataatcaccaagaattaaatcggtttaacactgaaggggcaacgtcaccgcacacggggaccgccgctcccgacggcgcgacgccgaaccaccccaacgcgagtcccccgcacgccggccacaacgccgagaccggccgcgggccgcatcatcgtcatcgcaaaggagtacgcatcatgaccgacaccatggcacacacccaacccgcatcacccgcaccgcccgcaccaaccatcaccgcaccgggcggccgcttcgtcttcggcggcgactggaaccccgagcagtgggacgaatccacctgggcggacgacatcgccaaactcgaacgcgccggcatcaacgaggccaccatcaacgtgttctcctgggcgctgatccagccggacgagagccgctacgacttcgccatgctcgaccgcatcgtcgacctgctggtcgcgcacgacttcggcttcgtcctggccacgtccaccggcgcgctacccgcatggatcgcgcaacgctactccgatgccacgcgcaccgactacgaaggccgtcgccaccgcttcggcgtgcggcacaacgcctgcccgaattcgccgaacttcctgcgtctggccggcgcgctggccggcaagctcgccgaacgctacggcgccaacgaccatctgatcgcctggcacatctccaacgagctcggcggccgctgctactgcgacaactgcgccgccgccttccgcgtctggctcgaacgcaagtacggttcgatcgaggcgttgaaccgcgcatggaacgcgaacttctggagccacacctacgccgatttcgcccagatcctaccgccgaacgcgatcagcgacggactggacggcgagcgcgccactctgtccgcctgcagcatcgactacaagcggttccagtccgactcgctgctgggcacctacgtcaccgagcgcgacgcgatccgcgcgttcgacgcgatgcatccgattaccacgaacctcatggacacctacgagggtgccgattatttccgttgggggcgcgagatggacgtgatcagctgggacgattatccgttcccgcacaccacgccttccgacaatgcgttcaagcacgatctgatgcgcggcgtgggcgacggcaggccgttcatgctcatggagtcgacgccgaaccagacgaactggcaggagtgcaacgtactgcgcgcgcccgggcagatgcgtgcggaaagctatcaggcggtcgcgcatggcgcggataccgtgcagtatttccagctcaagcagtcgcgcggcgggttcgagaagtaccatggcgcggtgatctcgcacggcgggcgcgaggacgagcgcgtgtacggcgaggtgcgtgcgctcggcggcgagctggcggcgcacggcgcgcggttcgtgggcggtctgaccgaggcgccggtcgcgctgatgttcgactgggattcgtactggtcgaccgagaacatctcgttgctgccgaagggcttcgactatccggatcaggtgcggcgctggtatgcgccgttccaccgccgcaacatcgcggtggatgtggtgccggaagacattgacgccgggcggctggcgggctatcgcgtgctggtcgcgccggcgctcatgatggccaagccgggcgttcgcgagctggtcgaggggttcgtgcgcgccggcggcacgttcctggcgacggtgatggcaggcatgcacgacgaacatgacaacgtgatcctcggcggatacccgggcgcgttccgtgaggtgtgcggcatgcgcatggaggagatggacatgatcccggacggccgcgacgtgcgcgccgtgttcggttcgggcgagggcgaggacgcggacgggtcccgggtctcgctggttgccgggctgatcaagctcgacggcggggcgcgcccgctggcggcctacgccggcgacgtgttctaccggggtacgccggcggtgacggtgaacgatttcggcgcgggcacggcatatttcgccggtgcggtgctggacgaggccggcatggacgccgtggtcggcgacgcggcgcgccgggccggcgttaccggcatcgtctcgccggagccggtggaggtggtcacgcggcggtacccgtcacgcggggagtcgttgacgttcgtgattaaccatgcggatacggccacggcgtggcaggatgcgccgttcgccggatgcgagtcggtgcttgacggcacggtactgggcagggatctggtgctggagccgtacggcgtgacggtggtgcgcaccgcggcatgacggattcgaccgccggccggtcgcggaccatatcccaagtcagcaaccggccgaaccatatctcgcggcttcagtcatccttcatcatcagtattcggtagcggccctaaatcagctccgccatccggctcataatcactcgccaaccacgggcggaagtagctcccgactatccacagtgggacattggtcagccaatcctgctccttgtaattccgcatcgacgtacggtaaccgcaaatcccgtatttgtcgcacagccacttcaagctacgcttatgacgctcggtaccagctttggcctccaacggaatgattgcgccattacctgcaaagacaaaatcaacttctcccgtactgttcgcattcgaccagtacatcggtgtgatgccggcggccactaattgctggcaaacatactgttccgttaacgcaccacggaattcggtcagcccgccattaccaaggaccacgcttgcgggagtcagatccagggccgctgccagcagcccaacatcatggagatacagtttgaacgcggaatcatcacggtatgacggcaatggtgccgcaggtttttcgacgcgatacacccgcaacgcaagaccagaatcgacaatctgctgaatcgcggattcatattgcgccgcccgagcgccacgagcgatgtggccaaaaataaatttatgattctcacgcgccagatgggacggaatcgaggaaaacaccaaacgcattttctcactatccacaccggttctgggatgtttggaaaagtccatgtcgtaattggataacaattctttctgcacggcacgcgcatgctgatagccatcttctacaaatgtctcaacgacttcgggcatgccgccaacaaaacagtactgacgaacccttcgctctaaacgttccgcaaatcccccaagtgtctcaatacgctggttccggatgcgttcggctatcactccatcaccgaccgcttccaagaactccacaaacgtcatcggatacatatcgatggaggtgacactgccaaccgggaatgacaggtcttcgtgctgagccatgcccagataggagcccgctacagcgacatggagatccggcatttcctcatggagcgctttcaacagagtcagtaaatcagggatttcctgtatctcgtcgatgcacagcagcgtcttgccgggccgaacgcgaaccccattaaacgcctccatggaatcaagcaacatgtgcaccgaatccacacctgtcaacgcagcctttgcaccaccatcgaacaaattgacataagaaaatgactcgaacttgtcccgacccagcaccttaagcacatgagtcttgcctacctgtctcgcgccgcacagcactatcggcttgtgctccgtcgcttcagcccatgccgacaacctggtatatatatctcgcctgaactccgccatgccgccctccctatcgcataggaccgtacatcacaaatcactgtcctgtcgctccatcataccgcaatacacatttttcctagggttgcgattgtccaagattacattttttctagggttagtaatgcagaatactgcacttttcccagggttagtaccctgaccttccctaatcacacggtgttgtaaaggcgagcggggaaggcgtcgcggtattggccgggggcgagtccggggcggcgcttaaagacgcgcatgaagtattttgggtcggcgtagcccacgtcgtgcgcgagagcgtgcgggatttttatacggattgtgttctttctgatcaaccggcaaagcaagcgatggcgcgcgaaatgcttggcgtaatttgcaatcctctaacttcgacgctgtggtgcgggttagggcaacgaaacattacagtagcagcagatggcaaatggttcgtagcggattcatgcacgtcgctgtcatcaagtatccaaggtttcgcactgccactcatcgcgcagaccgtcccgggctcaccggcacaggcgacgctgctggattcaatcatgaccctgatatcgtcggtattgcggctgccaagtggcgtggtacaagataagtacgaccgcaaaaaacttatgattgcgttcggcctgattggtttcgtactgttcggcatatgcgcggccctaggatgggcgggattactcataacccggtgctgatggtacttgcgatatgcctcggcatgggcatgattgagacgattgcggccccggcgatcacatttctgtccggcatcgccatgcaacactggggctactcagtcacgtccgtggctttgggcttgtgcatcgtggcggccgcgatccctgccgtgacaatgagggaactggtcacactgcctaagccggatggctgggaggaccatatccgcaaatccgggctcaccaagttctgacaacaagtaagggcgactatctcccggatttgtgacgctcggcaaccgtcagcgtcacaaatccgggaagaggaaggtggatacggtttcagccgcgcagccagacggtcatttcgttttcgccgcggttggcccaggcgaagtacgggatgagcgtggcggtgacgggctcgcgccaggccggcacttccaagcgcaccatgcggcgggtcacgtcttccacctcgccatggcccttctcgtcgatgcccttggcgccggcgtggaagtcgaactcctcgtccaagtgacccagacagtacagttcggggtccgggtgttgggtgaggctgtacccacggcttcgatccacttggagaagtcggtgtcctagaagacgaagccgtggaactgtccggttccggcgcctgcgcgggcagcaaggtggacaaatcgttgctggggtggaatcgcggcaagtatgcaaaaacctcccgttcgcgcgcgacgtataagcgcgcaaacgggaggcttcccaaccgcagcatcatatgcagaaataaggagtgtaaggcatatgctgccgcggtcacaccccgccgggaacctgccgcaggccgcgtccggcatcgaaagccatgcagtcgatgcgtgcggccggccgttcccggcgcggtggccatgtcagtcagacatcagtcggacgtcaagagacatccgatcagacatcatcacttctgccagccgatgtcctgcggcaggttgccggcgaagccggacgggccgtagttggccaggcccttcttcgcaccgaggtacgcagccgggttggagaccgggatggtgccatacagcttgagggcttccttctcggcggcgttgacggccttggtctgctcgtcatagtcggagaggttgccggccttcttgacgagctcgtcgatcttcttgttgcccacgtaggagaagttggacgggccatcggaggtgtacagctgcggggcggacaccacgaaggtgttggcgctcggagcctgccaagccatcggcagcacctggtagttgccggaagacacggtgtcggagaacttggactcggccacgttcacgaccttgaccttgatgccggccttcttcatcatcgcctggtaggcgttggcgagggcctgctgggtggcgtcgtcaccgaagaaagtgaaggagatctcaagggtcttgccgcccttggcatagtagccgtccttgcccatcttgtagccgtcggcctcaagggtcttcttggcgttatccacgttgtacttggcctcggcgggcaggttgttctcgtagcccttctggaacggcagcagcagctcagagcccggctgctcggccttccagttcaggccctggaactgcacgttgttgtaggtgttcacgtcgaaggcctgagtgatggccttacgcacctgcaggtcgtcaagcggcttggacttgccgttgtactccaacacgcgggtcttggtgctgtagccgatgcgcagctgggcgtccttgacggaacggatggccttgatgtcgtccttggtgtaggcctccacggcgtcgatctcgccgttctggaaggcgttgagggaggcggtgtcggccatctgcttgtagacgatcttgtccagcttcggcttgttgccccaccacttctcgttcggcacgaaggtgacctgggagtcggagaaggagtcgaccttgtacggaccggcggcccactcgttgtgcgggttcttcacccagccctgggtgaaggtcttagggtcagcggccttcgggttcaccagagcgctgaagacttcctgccacgggtagtacggggtcttgtaggtcaccttgacctgcttcgggctgtcgccctgctcaacgctagcgatacggtcgaagccgtcggtgctcggcgggttgtagtccgggttggagccgttgttggcttcccacgtggccttgaaggcggtccagtcgatgtcggagccgtcgttccacttggccttcgggttgatgtcgtactgcacgaccatcgggtccttgctcacgagcttcatgtcggtcaggaagtccgggttcaccttaatcggggagccattgacctggtcggtcatgagcaggctgggctggtaccagctccacagctcggacaggtagccggtgttgccgtcggaagacaggtagttccagttcgggccgatttcgacgatggacagggtcagcgtgccgccgtccttgacgttgtcacggctctggtggttgtcgtaacgctcggtgaccttcggcatgggcaggtcgccggtgtatgacgaatcgatgccggccggcggttcagtggcgctcgaggcgttgctggaaccgttgccattgcccgcgccgcagccggcaagcagcatggcaagcgccgcagtggccgcggcgagcgcggtcagcttacgtgtcttgttcattgttatttcctcctctatatggttccgaccgtcatgcgaaatggcatgcaacctgatggccgctcggtcgggaagtgtcatacggccgcagcgccgggcgttcgccgcggcagcgggcctgttgttcggcgctcagcttgggcatgagcgggcagcggcccatgaacgggcagccttcgaacgtctcggtggggctgggcacctcgccttcgagcacgatgcgctgacgggtgcgttccgccttcgggtccggcaccggcacggcgctgatgagcgcctgggtgtacgggtgcaacgggtgctcgaacacgtcttcggtggcgccggattccacgatgcggcccaggtacatcaccgccacgcggctggagatgtggcgtaccaccgacaggttgtgggccacgaacaggtaggccacgcccagcttgttctgcaggtcctcaagcaggttaatcacgccggcctggatggacacgtccagtgcggagaccggctcgtcgagcagcacgagctgcgggttgaccgacagcgcacgcgcgatggcgatgcgctggcgctggccgccggagaactgcgtggggaaacggtccacctggtcggggttcagttccaccagacgcatgagttcgccaatgcgttcgcgaatctgctccttggagtagtgctggaccttcatcggctcggccaggatgtcgtagatcggcagacgcgggtcgagcgagctcatcgggtcttggaagacgtactgcacggacgaacgcagctcgcggcgcttctcgcgcggcatcttgtgttcgagcttggtgccgaacatctcgatctcgccgtcctgcggctgcttgaacgccatgatctccatgagcgtggtggacttgccggagccggactcgcccacgagcgccacggtctcgccctcgcgcacgtccagcgtcacgtcgtccacggccttgacctcgccgatcttgcggcgcaggaatccgccggcggtcagcgggaaggtcttgcgcatgtgcttgacgtcgagtaccatcttgcgttcgtcgcgcgggacgccggcgaacttcgacttggcggcctcggccaccgtgtacacgtcgtggaaggtcaggcccttgctcacgatctcctgggtgcgatggcaggccacgaactggcccgggcggccgggaaccggctccatggccggctcggtggtgtggcagatgtcggtggccagcgggcaacgcggcgcgaacgggcatcccttgggcatgttgaccaggttcatcggggagcccggaatcggcaccaggcggctgttgcgttcgcggtcggaacgcgggacggcacccagcaggcccatggtgtacggcatggccgggcggtcgaagatggagtcgacgtccgccttctcgaccgggcggccggcgtacatgacgacgatgtcgtcggccacgccggcgatcacgcccaaatcgtgggtgatgaagatgacggccgcgccggtctcgcgctgggccttgcgcagcacttcgagcacctgggcctgaatcgtcacgtccagtgcggtggtcggctcgtcggcgatgatcacgtccgggtcgttggcgatggccatggcgatcatcacgcgctggcgcatgccgccggagaactcgtgcgggaaggacttcaggcggccctccgggtccgggatgccgaccaggttcatgagctcgatggagcggtcgtgaatctgctgttcggtcatcttcggattgtgggcgaccagcgcttccttgatctggtcgccgatggagaacaccggagtcagcgcggagagcgggtcctggaagaccatggcgatgcccttgccgcggatctcgctcatctcaaaatcggacttgttgagcagctcctcgccgtggtaggtgatggagcccttgacactggcgttcttgtccagcaggcccatgatggccatggaggtcacggacttgccggagccggactcgcccacgatgccgagggtcttgccggggtacaggtcgaagttcatgccgcgcaccgcgtgcacggtgccggcttcggaggcgaagctgacggtgaggtcgcgtactgaaatcaccggttcggatgccatgccttgcgctcctgtggtgttgggattggtggtgtttgcgttgcgctcgttgcgctgttcgttgctcatgatgttcgctccccctctcactcggccttgccgccggaacgggagtacgggtcgatggcgtcacgcagtccgtcgccgatcagctgcacggagaaggtcaggacgatcagcaccacggacgggaagatcagcacccatggcgaggtctgcaccacggactggccggcgttgagcagcgtaccgagcgaggtgtcgggcgccttgatgcccaggcccaggaagctcagcgaggtttcgctgttgaccgcaccgatcacgccgagcacagtgttgatgaccagcaccgaacccaggttcggcaccagatgacgcacgatgatggtgaaggacggcacacccatgaacttcgccgcgcggatgtattcgcgatcgcgcaggctcagggtcagcgtgcgcagcgtacgggcgtagccgatccaaccgaatgcggtcaggccgatggccagccacagccagtcgctgccgccggccgccatgccgacgatcagggcgatgagcaggaaggacggcacgacgagcagcatatccagcagccacatgcccacgcgctcgaaccaaccttcaaagaacgccacggccgtgcccaccagggcggcgatgatcgtggtgccgaacgagctgaagataccgatggtcaacgaacggccgaggccgcggatgatcatcgcgtacatatccgagccaccgaccgtggtgcccagccagtgctgggcggacggcggcgaggcgagggcggcgaaatcgggctcatcgtagctccactgggagaatttcgagccgaaaatcgccaaaagaatcagcagaatcagcaccaccagacccaccacggccgaggggcggcgcatgaagcggcgcacgtacagctgcatgcggccggtgcggtggaagtcgtcggcgctggaagcctcctgggcattcctggcgtcggcggactgcggttcgctgccctgcggatcggtgagttccatatcctgggcggcggcgtcggagaccatgttctcgttgtcgttcatcatgttagatcgtcctttgcgcggggctcagctcagtcggatacgcgggtcaagccaggcggagaagatatccgccagcagcgcgccggacagcgtgcacacgccaccgaacgcggccacggccacagcaccgttgatgtcgttgttagcgatggtctgggtgaagtacatgcccaggccgttgatggcgaacacgttttcggtgatcaccgcgccggtgaacacgccggcgatggagaaggccacgtccacggcggtcgggatcagcgaagtgcgcagtgcgtggcggcgaatggccgcgttgagcgtcaggcccttggcgcgggcggtgcgtacgtagtcggcgttcatggtgtcgagcaggtacgtgcgctgggtgaggtggtagcccaccatgcccggaatcgtcatcacgatggtgggcaggatcaggtgttgcagatagtcaaacacccaaagcaccgggttggagccttggtaggagtgcaggccggtcacgtagaacgcgcggctgcccacgatgttgttgaagttgatggccagcagcaccaccatcaggcccatgacggcggccgggaccaccaggaagaacgttgcggtggtgttgagcacgcggtcctgccacttgtactggcggatggccgtatacacgccgatgctcacgccgaagaggatggagagcacggtggcgagcgtcaccagctgcagcgaagcggagatacgggaggcgatggccggcgccaccggcgactggtccgggctcaggccccagttccactgggtgaggatgcccttgagccagcggaaatagcggatgacgaccggcgtctggtcgttgatgttggccagatcgagcgaccggttaatcgacgcgatcggcggatgcggattgcgcgacatgtagttcgaacgcggatccatgaatgcgctggccaggaaatacgtcatcgatactgccacgaacagcatgatcacgtagttcacaatgcgcttgatgatgtacttgaacacccaaccacctcccagataactgggaaaatgatcccccccccgctcaaaaccacaaattgagttcaatatatggaatatgggtattgacttttccgactttttcctgtacggaaaactgcgaaaacacttactgcatattgggcaaacatccgtttgttaattttgtatttcctgagcctttgctggacatgccttatactttcgtgtcagcagtccgccggcccggatggtgacagtccccgccgccggcaacggatcatccatcagcatcatcagcatcagacaggggcatcatgacgacagacgccagcgcacgggccatcaaacccgaacttctgcgtacgtacaccgaggatttcaacaaggaccgcgccaacctgatcgcggcggacgcggcggtttcggccggcgtgctcaaggcggccaccgactatcgcggcgtgcgtgcgctgccgcgcgacttctccatcgaacttaagcaaggttcgatcaccaatcaggagcgttccggccgttgctggatgttcgcctccctgaacacgctgcgctacgagcttatgcatcgctggaatcttgaggacttcgagttctccgagacctacctcttcttctgggatgcgatggagaagtcgaacacctacctggagaacgtgctgcgcacgctcgacgagcctaccgactcgcgcctgttcgaggccatcaactggggcccgtccgatgacggcggctggtggcagatgttcgccgcgctggtgaacaagtacggtctggtgcccaagagcgcctacccggagtccgagaactcccgtaattccgatgatttcaagcagtacctcaactccaagctgcgcgagttcgcggccgagctgcgccgccgttcggctgcgggcgctggcgaggacgagctgcgcacgctgaaggacgagtacatgggcaccgtgtaccgcatctgcgccgtgtcgcttggcgagccgccggagaagttcgacttcttcgcacgcaccaaggatgacgccgaggacgataagaagtgcgacggcaaggcctgcaagcgcaaggccgatgccgacggcaaggacgaatcctgcaagtgcgaggacaagtccgacgccaaggcgtgcaagtgcgataagaacaaggacaagaccggcaaggacgagcgcccgcagatccgcgagatcggcatcaccccgcttgagttctacaagaagtacgtgccggtggacgtcaacgattttgtgacgctggccaacgccccgctcaagagccgcccgttcaaccggcgctatcgcatccgcttcagcgcgaacgtggccgaggcgggcgatatggagttcgtcaacgtgccgctggacgtgttcaagaaggccgcgcttgaccagctcaccgccggccatccgatctggttcgcttgcgactgcacgcagttcgccctgcgcaaggacgggttcttcgaccagtccgtggtgcgcgtcgaccagctgttcggcaccgaattcaccggagacaaggctcacggactcgaatacggcgacagcccgagcaaccacgccatgaccttcaccggcgtgaacctcggcgaggacggcaagccgaaccgctggaaggtggagaacagctggggcaaggacgccggcaaagacggctattacgtgatgtccgacgcctggttcgaccgtttcgtcaccgaactcatcatccgcaaggaatatctcgacgacgccacccgcgccctgctcaccaccgaaccggtcgagctcgacccctggctgccgctgacccgccgctgccgctgacgttttctcttagctcccgctggcgggagcatatattcgaatgccccttctctctgttcagagagaaggggcattcacgtttatttactgagctttggcgcctcgtgcttggtgtagcggaccacggcatcgggaaatccggcgtggatgtagtcggacagcatccgcaatagtcgctcgtcaaaggtgttctgttcatcgctgctggcgtcgaccaggatgaaatcccatgagtattcgatgtcgccgtcgttgatgatgagaccgcggccggtgatctttgcggccagcaacgcggcaatctgtatggtgcctcgcttgaccaaggccgattccgcttgagtcaggctgcccggaaatgtgacggaatacatggtcttcccttcgttcaatgaacgcaacagttcctcaccataggtagaagaaaactccgccacaattcgggtctcatcatgcaaccagcagtcaaaaagaagaaacccggcggagggggccgccgggtgagagagaagagagaagaagggttcagttatggggttcggaagaacctcgccaccggtatgaacttcattccgttgacatgttctatataaccatctcattcttggggattcgatgtgcttgtctgggaaaagtcttggcaaactgtgacgggtttgtaacgctgcctgacaaccggcacaactatgtcgggtcttacgctctgggcattctcgtgcccaaagccgaatgacactataagcacaggggggtaccccgcttcaagagcatggacgcacaatgtgccggtcccaatcgcacataatgaaacgggccgcaccccatcgccacgcaatgcggcgaaaggaatgcggcccgtcagctatggactaacgacgtcgaatcactcggcggcgagcttggccttctcggcggccagacgttcggcctcggcggcgcggcgagcagccaacgcttcatcgaagcgagccagctcctctttcacggcctcggtcggaatcttggcgaagatcggcgtgggcttaggcaccacggcgccgacctcgatcgcctcgctcttccacgggtgcacgttcacaccgagctcgtagttgccggtgatgatcgggtacgtgaagccgggcttgtcgagatcctcgacttccttgagctcgggcagcggcgagaacgtgccggcgccgccgagcgcctcccacactttctgcgcggaatgcggcaggaacggcgcgagcagatggttcgcgtcggccacggcctgagcggccacgtgcagcacggtgccgagacgagcctggtcgtccttaatcttccacggttcggtggcagaaatgtacttgttgatgtcgccgaccacgcgcatcgcctcggatagggcgtgcttctggtggtgggtttcgatggaggagccgaccacgtcgaacgcggcggaagtctcttccagaaggccacggtcttcgttggtcatcgaatcctcgtccagcggcggaatctcgccgaagttcttgttgatgaggttggacacgcggttgaccaggttgccccaggaggaggcgagctcctcgttgttgtggcgcacgaactcggcccaggtgaagtcggaatcagaggattcggggccggccacggaaatgtagtagcgcacggcgtccacggggtagcgggcgaggatgtccttgacgtagatcacgatgccgcgggaggagctgaacttcttgccttccatggtcatgaactcgctggccaccacctgctcaggcaggttgagcggacccatcgggccggtttcgccgcccttggagcccttgccgttgtatgcgagcatttcggacggccagatctgggagtggaaggtgatgttgtccttgcccatgaagtagtaggccgggcacttcgggtcgttccaccattcgcgccacttctccgggtcgccctggcggcgggcccattcgatggaggccgacaggtagccgatcacggcgtcgaaccacacgtacagcttcttgttcgggttgtcgatccaacccttgaccggcaccggaataccccagtcgatgtcgcgggtgatggcgcgcggcttgacttccttgaacaggccaagcgagaaattgatgacgttggtacgccagcccttgcgggtctccagccaagccttgttggcttcggcgagcgccggcaggtcgaggaagtagtgttcggtctgctcaaagcgcggggtttcgccgttgatcttggaaaccgggttgatgagctcgtccgggtcgagctcgttgccgcaggcgtcgcactggtcgcctcgcgcgccttcggcatggcagatcgggcactcgccctcgatgtagcggtcgggcagggtacggccggtggaggggctgatggccacctgctgggtgcccttgtagatgtagccgttctccaagcactgcttgaacatctcctgcaccacgtgctcgtgattgccggtggtggtgcgggtgaacaggtcgtagctcaggccgaggtcgcacaggtccttggcgatcacacggttgtagcggttggccagctcctgggccgtgagaccttccttctccgcctcaacgagaatcggggtaccgtgctcatcggtgccggagaccatgagcacatcattgcctttcatgcgctcgtaacgcgcgtaaacgtcggagggcacaccaaatcctgcgacatgaccaatatgacgggggccgttagcatacggccaagcaacattcaccaaaacatgactcataatgtttgattatccggcgcggcggggacacgccgggcacacgcataagcaacgcgcggaaagcccatcgaaatgccgatgcacagcacaaagagcatgcctaaacatgtggattaccgaccattgcgcagcccctcaacaaaccgcccacagcattgtccacaatctcggcgcggcagtcggaattatccacttatccaccgttttcgcctatccggtagcgcccgagcgcaaactatgcgtatggtcgggcacatgaatgcaccaaatcgctcgatgacgagcaccatagccaacgccggcaccgctcggcacaccaccgtcagcccatcagtgccgcccgtgctgttcaccaaagatctgcccggaccgctcagcttaagccggctggaaacattcggcaccatacgaaagttcgacgaatccgctggctactggaacgaacacgccagcacactatatggccgcgcgatgattgtctccacggtcgccccgttcggaaccgtggcgtgcgcgctgactgccgcctgggtgtggcttggcggcccggattttccgagaaccattgacgtgatttccacttcgcattttcgttcgacttccgcaggccgccgcatccgcgtattcaggcgggtcacgtcgccagagcacattattcgactgggcaatcttcctgtcaccacaccgcagcgtacagcctgtgatctggtgatgggcatggacgatgcgccggacccgtccgccatcaatacgttggtatgccgcttgatgaccgcatacagtttccgtgccagcgaatgcctgcagatcatcaaagagcaccggcatcataagcatgccggtcgcgcacggatatttttcgaatcattacaacgggagtccgaaccggccttagggcaatgcgcataaccggccgccacgcttcccggcgacttgaccgtctgcatcaagcgcagcggctaccgcgcgcttctgatattcaatcgcatagcccgcacgcgagcgctgctgtcaatcatgatgccccaccatcgccgccaatcgcattgaccccatccgtagcctgttcgccggatacgccaatcgaagtgctgtggcatatcgcccagcatgcgcccgaactcaggcgctggcttattgccaatcctcgagcggatgcggcattgttggaattcatctcgcaggcgggcggaccaggagtgaagcgggcgctggcggttctactggaatcgatggaggaggaataatgctgccgcaagtctcatcccccggcaaattaccgcggaatctcaatcattacagatgccatcaattatccacgtcaatcgcaagcgccaaccaacggcatcatgtaaatacgcggatcctaccccttaatctccaacaccgccgcatacacttgcttgcgattggccagcgaaccatcggccaacggatgctcctgcaccacctgcgcgatggcgtccttgatacgcaggccatcctccaacgcacggtcgatagccagcacggccatatcttccacgctcaacgtgctgggcgcggcggcctcggcctcttcactggaggcgccgccgatgaccaataccatctcgccgcgcggcggatcgtcaatcacactctggcgaatctctccgattggacctcgccggatttgctcataatccttggtgagctcccgacacagcgccatcgggcggttcgggccgaatgcgtcaagcagatcatccatcgaatcggcgatgcggtgaggcgtctcgtaaaacacaatggtgcggcgttcgcccaacagtgtgcgtagatattgcactcgttcggcatgcttgcgcggcaggaatccctcgtagcagaagcgatcggtgggcaggccggaaagggcaagcgcgtcaagcacggcagaggggccaggcgcgcaggtgacgggcaggccgcgttcaatggcgcggcgcacaatggccaggcctggatcgttgatggtgggcatgccggcgtcggaaacgacgagcacggtcgcaccggtttcgacctgatcaagcaaaccgtcggccttgtctcgctcgttgtgatcgtggtaggcgacgactcgaccgttcacatagacgccgaggcggcgagccaggtcgaacaggcggcgggtgtcttctgcggctacgatgtcggcacgttccaaaaaaaccaccagacgagcagaagcgtcgccgacgttgccgattggggtcgcagcgagtaccacagtgccagcaggaatagtcacagccgactcgcgagtttgggaagcggcaggttcgccggcatcaatcccatcgttcccatcgttgcgttcagacacttgtgcgacgctctgttcagcgtcacgctgttcattcaactcatctgcgcttgtcatactcccagtattgcccaagccaaagagcaatctgctgtgggatcaggagcattctgcacttcgaggggttgatttcacatgttccggagatctacttccgtttcgaggggctccccaaacgtcaaaacgtgagtaggaacggcctgctatcaatgatatttcgccgttttggagacatgtctacttaacgaccagccccttgaaacggaggtagacctccagcaaacaccaaatcagcccctcgaagtgcagaatgacccttcaccaatgagttttctctgcgctttgcatttttgaggtctactttcaaaatgaaaagaccctctgcggtggaatgaatgcagagggtctcgtggagctgacggtagtcgaaaccgcgacctcttcgatgcgaacgaagcgctctaccaactgagctacagccccttggatgttactttgctccgcaaagcaactcgcacaaatataatacggggtgcagtcaaacgcaattcgggcaaggtgtcggcagacagactattttcccaaaaatctggaagaacgcacactgagcacacagcagtgcacattttccggacaagagccgaaatagtctgaaaaacgtatgccagctggctggtcgaatcaatcaagccaatccagccgcaactgcactatgcctatgcccccagcatgtgcaacaccttcttctcgttatagaacgcgaacacaatgccgcccaatccacacagcacagccgcgcacacggcggcgatacggtagcccgcgccggatgccatgccgatggtggacactccggtgaacagcaacatggccacggactgccccattttcatggcaaaagtacgagccgcgtagaacatgccctgacgatcttggcccgtggtcttggaactggcatcggcgatattcgccacgatggcctgcggcaggatgccgaatgcagccatcggaatcgcacccaccactgaaagcgtcagaccctgggccatggccggcatgaaggcgagtacaccggagccgagtgcaccggcaaaggcgaacgcgcaggtgaaaatcacaaaagcgataagcaacaagcgctttttgcccacacggttagccaggatattgaccggcagatagaacagcaccgagacgccggtcatgagtacaaagtagatggtcgtggtggtttccggcagtttcagcagactggtcacgaagaacggcaggccggtctggaacgtggtgatggccacccagtagaccacgtcggagcatacgaacttgcggaattcaccgtcggaaaaggtctgcttcagggattcaatggtcgattcggaggtgggctgcgagttgacgtagtccttctcgcgaatggccagcggcggcacaagcatgcaggcgaacgccacggcagccatgatggtaaaggtcacgcggatggcggtgatgcgccccatcatcggcacgaatgcgccccaaatcaccggcgccacataggcgatggcggtgccggccacccaggtgaaggagatggcggtggagatggtcaactgctgcttggaatcgtgaccgagctcggcgatgagcgcgttgtacggcgtgcagtagaatgtgagggcaatgtagtagccgataacagtgacgaacaggaatgccgcgttgacccaactggtgccgttgatcggactccagaacacgagtacggtgaccacggcgagcggcagggccgcgaatttcaggaagggcatgcggcggccggctttggaatcgcagcggtcggacagggaggccacggccgggtccacgaaagcatcaaagaatcgggcgaatgcggtgatgcctcccaccacggttactagcccaagcaccacgagaccctgcggcacgaacacggtctggccttgggagatggtctcctgatcgggctggtagaagtagacgagccagttggagatgatgccggaaagcagcgcccagccgaactggccgaccgcgaaggcccacactttggcaatgggcaaatccttgatagtcgattgcaacgagccaccggacacattcgttgcacttaccgctgttgcattgtccattctcataccctccgaatcaacattgacacagtgtcaagattcagtatacaccgcacagcgcagcgccttgcagccgcgcagccacacgccctacgatagtaggcatgacaggcctaaccgagcaattgccgcacaccgccgcattccccaatgccttgggaaccggcctgctgttgcataccgcgagcgcgctgggcggtgacctgcaccagcacatcgaagacctcatttccgattacgaaaacgtactgtctcgatttaaaggtgactcgattgtgggtcagatgcgcgtggccacgcacggcggcacattcgattttcctgactggacgctgaatctatttgacctgtatgaccacttgttttctgctaccaatggggcgattgacccatgcgtgggcgaagatctgattcggctgggatatgacaaatcatattcatctgtgaacgaacccaatgccgctgaacacacaggtgcgattcatgggcgggccacatgggatcacgccatcgagcaccatggcacaacgttggttacgcatggcccggtcgcactcgacttcggcgcatgcggcaagggctatctggtggatctgattgcggaaaggctgggggcggcccagagcgacctccgatatgtcatcgacgccggcggcgatttgctggtgcacacgagcgaaccaatcaccatcgcccttgaagatccctccgacccggctaacgccgtcggtgtggcagagatcagccaaggcgcgttctgcgcaagctcccccagccgccgacactggaccgatgccgccggccatcaactccaccatctgctcaacgccatcgacggtgtgccggttaacagcgtagccgccacatgggttgccgctacgccgccatctttggctaccgcccaagctgacggccttgccaccgccctcttcaccaccccggccgcccagctgcgcgcacactttccattcgaatgcgccatcctcaccgccgaccgctccgctgcccagtctcccgattttccgggcagctttttcatgcgatagttcagccgtcagtccgacaaagcgaactggctgttgtacaaatccgcgtagaagccaccagcagccagcaactcctcatgcgtgccgcgttcgatcacatcgccgtgattcatgacgagaatcatgtcggcgtcgcgaatcgtggagaggcggtgcgcaatcacgaaggaggtacggtccacggtcaacgcgtccatggccttctgaatcaactcttcagtacgggtatcaaccgaagatgtggcctcatcgaggatcagaatcggtgcgtcctgcaccattgcgcgggcaatggtgagcagctgcttctggccggcggacagcgacgaattctcgtcgagcacggtgtcgtagccgttcggcagcgacatgatgtagtggtgcaatcccacagctttgcatgcgctgatgatctgctcatccgtaacgcccggcttggagtaggcgatgttctcgcgcacagtgccattaaagatccaggtatcctgcagcaccatggagaactggtcgtgcacattccagcgcggcacggacttggtgtccacgccgtcgatggcgatcgagccaccggcaatctcgtagaagcgcataagcaggttgaccatagtggtcttaccggcaccggtcgggcccacaatagcaaccttctgaccggaggagacagaagcggagaagtcgttgataatcggcttgccggcctcatattcaaagcgcacgtgactgaattccacatcgccgtgcacctcatggccttgagcgccaagcagcgcctgcttgccggattcgtcagccatttccgactcttcgaggaatccgaatacgcgttcggatgcggcggcgcaacgctgcaggttctggaacgcctgcgcaaactgcgagagcggctgcgtaaacaggcggatatacatcatgaacgccacgatcacgccgaactcgatctggccgtccatggcgagcgcggcacccaccacgcacaccaccacatagccgaaattaccgacgaagttcatcagcggcatcatcagaccagacaagaactgcgacttccagccggaatcgtacagatccgcgttgtagcgctcgaaccgacgaatagaatctgcctcgccgttgtatgccttgacgatggtgtgaccggcgtacatctcctccacatggccgttcacatcacccaacgcgacctgctggcgggtgaagtacttttgcgaggccttcataatgaccatcatgatgatcaggccgatgatgcttgaaccaattgcgcacagcgccatgatccagttgttgtagaacatcatgaccaatgcgcccacgaacagcgtcgcggatgtgatcagcgatccgagcgactggcccagcgtctggccgatagcgtccacatcgttggtgacgcgagaaagcacgtcgccgtagctgactttgtcgaagtaactgagcggcagcttgttgatcttcttgctgatcgactcacgcaactcctgcgcagtgcgctgcgtaacggtggccatcatccagctctgaatgtagctgagcaacgcgtagcccacatacagcaccacaagcagccagccgatacgagcaaccgcgcccatgtcgatggaattgagcaccggcttgccatgcactaccgcaggcagacctttggtgatctcattggtcatgtccttgagcttgttcgggccgataatctggcagatggtgccagccgcgcccagcacaagcgcgacaatgatggcaggaacgtatttgcggcaaaagcggacgagtttgcccatgactttgccgaaatcctgtggtttttcgaccgcacctccgcggcccataggtcctcttggcattgtttcttaagtcctttgtctcttggctcccctctggaggggagctgtcacgaagtgactgagaggaggcttcagagaccaccctcagtctcgctatgctcgacagctcccgccagcgggagccatataagttacgcagtcagttccgattcactcagctgggattcggcaatctgtcggtacacttcgcagttctcgagcagctccctatgcgtgccttggcccacgaccttgccctcgtcaagcaccacgatgcgatcggcgttcatgatcgtgccgatgcgctgggccacgatgagcttggtggaatccttggcttccttggcgagcgcgtctcgcaccgcacggtcggttttgaagtcgagcgcggagaacgagtcatcgaaaatcaggatttccggatgacggtagacggcgcgggcgatggacagacgctgtttctggccaccggacacgttcgagccgccttgtgcgatcggcgaatcgaatccgccgtccatgcggttgacgaattcgctggcctgggccacgtcggcagcggccttgacacggctcatctgttcgtctgtcaacttgccgtcgttggcggcatcggtggccagctgaagcgcctcgcgcttgcggccggcggaagtggaagtatccgccagttcgaccgcgtcgttctctccgggcttgtcgccgtagctgatgttgccggccacggtgcccttgaacaatacggagcgctgcggtacatagccgatcttgtcgcgtagggcgaccatgtcatagtcgcgcacgtccacaccgtcgacgagcacttgcccggcggatacgtcgtagaagcgcggcacgagattaatcagcgacgacttgcccgagccggtagagccgatgaacgccacggtctggcccttctcggctttgaaattgatatccggcagcatagcctcgcgcgaatccgggtaggtgaagctcacattcctgaattccacggtgccggtctgaccggtcttggcgatatcggccgcgcgcttggtgccgttttccacaatcggctcggtgttcaacacttccatcacgcgctgcgcggacacgtcggcacgaggccaaagcacgaataccatgctcatcagcaggaagctcataatcacctgcacggagtagctggagaacaccaccatgttggagaacacggtgagcttgtcggtaagctcggcggcctcgatcaggtaggcgccaatccagtagacggcgagcataaggccgttcatcaccgtgttcatcagcggcatcatgatggccatggtgcggttggtgaacagctgcgtatcggtcagatccttgttggccttggtgaatttggactcctggtagtcctcggcgttgtaggcgcgcaccacccgcagaccagtgagattctcgcgggccacgaggttgatgttatcggtgagcctctgcatggccttgaacttcggcatgaccagtgccatgaggatcacgacagcgaccagcagaatcacgaccgctatggccgtggcgaccgtccattcgaagccctcgccggcaatcttgcagacagcccacacggccatgatcggcgacttgacaatgagctgcagacccatggtgatgaacatctggatttgcgtgatgtcgttggtggagcgggtgatgaggctggccgtggagaacttgctcatttcggccgggccgaaggattcgaccttacgaaattcgagcgagcgtaggcgctggccgaagctggaggccacgcgcgccgcgatatagccggtgatgatggcgcagcagaccgagccgagcgagaccagcagcatcttgccgccggcgacccagatgtccgccattgcgctgcccggcgtctcgaccagggtggtgatgtctgacatataatcgggcagttcgaggtcgaaccagatttgcccgacgatggacactaaggcgataagcatctgaccgatctccgctttggagaggtatttcatgatgcgaaacattggtttccccttgtgttggttggttattgggttattaactatttgatttgtggattgattgagttatcgatacttattgattcacgatgtcttaatagttttcattatttgattacttacaccgtaagatattacgcgcaattctgcatgttcgctgcgagcatcatcaatcatgcttgccgatcagccctcagcatgtttggccgccatgtgctccgccacgcgcttatcccgctcggcaaacgccccccgcacttgctcaggagtaggacgcggctggccgggatggcaaatcgacatgtacgtggtgaattccgaaagcaaatcaacgaattcgcgcgtgcgacgctcccccatctgcgagaagatccagcagattgcggaacgcatctcatcaatcattcgacgagactcctcacgcccggaatcagtaaggctcacgcggatgatgcgccgatcattagaatcaatgtcgcgcgtaatccagcccttcttttccaatgatgacagcacggtggagatacggcctgagctggcttgaagcgcagtcgccaactgcgacggcgtctgggtgcccttgaaggacaactcccgaagcacgaactgctctccatgggcgccgcgcgtgaattccctctgcattttcgaacgattgccccatacgctggcatacagctcgccgaccgcttcctgctcgaatcccatatcgaagcaccatccatttcacgcaccatgcggcagtgcaccgcaaacatcccaaagaatatctcacaccgtaaacaattcaccattgagagtaatctagacagatccgtcgtcccagctgttcacgagaccacaaaaacgatagagcacctgtaaaaaacgaatcaatacacagcacctatacattgcaacgattccgggctacatatggagtcaagaaagagctggcacggaagccagaccaccgagggggcgggaatcatgattcgaggaatgaatctatgcagcattgatggatgcacgaatgaggctgaggaagcgggctgtgcagcatgcatttcacatcggcactagtgcacggggcattgcgctaccctggcagcggtcgtccgtcgcatagctgacccatgcgcgacgcccttctctaaggctgagccgttgttagacgactaaaggggaaatagcgccacaactgaaccatccattgcgacgccactcccttcggccgaatacctgtatatcgatatcgtctactccagatcacgcgtgaaatagaccacgtcgggacgcctacatattcttctccgacgagacaagcggcaccaagaccgccggcatcggccgcatttacgaattgacggccgcggatatcctcacgctggaccatattgacttcaactatgcattcaactacccgtgcgcgttcagcctgttctgcacctgcccaatcccatccaagcgcaaccatttgccgtttgcggtcacggccggagagaagacaccaggaatatcagtactgatttcagcatttgcttggcgcccttctgaagaggggagctgtcttcgttagacgactgaggggagtcccggtgccaccgcgactcccctcagtctcgctacgcaatccagctcccctcagggagggggagccaaaaacctactccttatgctctagcgcggccttcaaatcacgactgcggtaacgctcgcgcaacagcgagaagccaccgaagccaatcaaccacaccaagccggcaatcgcggaattgcgcgtatcgtccgccaagaacagcgtcagataaataaacacgaagaacacaatcgccactgtgttcagcaccttccatgcaggcatcacgaaaccgtccgggatgaagtcgtccgaacgacggtacttccggtgtgccaccagcgtcagaatgtaaataaataggaacaccgcggaactggcagacgagaacagcacgaacgcaccggaaacacctggaatggcgttaacaatcggcgagagcagaatcagcactgcagacaccagaattgcgcgcgccggcactttgcgatcggaaacctgaccgatcttgttgagcatcgggctcggcgactcttcggccagctggtacaggtgacggccggcggaatacaacagcgaattgagcgacgaggacgcggcggtgatcaccacgaagaacaccagggcggacgcccagttcagcccggcgtactggaacaccatgatgaacggggaggcgaaagagccgtcctcgttcggcttgaacgaggtccacggcacgatgcacatgatggccacgagcgcgcccacgtagaagatgagcacacgcacgatgatctcgttgacggctttgggcagcacctcacgaggattcttggtctcggagacggtgacgcccacgaactcgagcagctcataggcgaagaacaccatctggaagctcatgaggaaggccatccagccgttcggggcgaacgagaagccggcgaacaggttgtcgagtccggcgtggcccgccgggctcacatgatccacgccatgaatccgcgcggccgggtactggtagccgatcacgatcatgaccacggcggtgacgatcatcgcgccgatcagcgtgatcttgatcatcgagaaccagaactccacctcgccgaacaccttgacggcgatcaggttgacggacaccagcgacaccaggaaacacagctcgatcagccatttccaatgggtcaggtcgatgccgaacgtgtcgaagaaggtgatgaagtacgtggagacggccgtgatctcggtcatacccagcagcacgagcgcggcccaatacgtccagccggcgaaatgcccccatccgttgcccaggtagcgggtgatgaaattgatgaaggtgtgctggctggggtcgcggtacatcatctcgccgatggcgcgcatcaggaagaacatgatgacgccgaccaggatatacacgaagacgatcgaggggccggtcagcgagatcgatttgccggagcccaggaacaggccggtgccgatagtgccgccgatggcgatgaactgtacatggcggttgctgaggcctcgttccatcgcattggtctgatcaaggctctcgacggacttgagcttgctcccggactgctgcgcgttaccgttcgcatttgtatcggccatactgatttcgtttctcttctctgccgctcggccctgttcacgccgactacggcactcgttcaatgcaagttcaaactgtatcaccgatagatgtcgcgaaaatcacccagctcacgaacgcacgtgatgataccgcgaacattaggccaaaaagttcaattcatcaccaagaaattgaactttctccatcttgtcctctctcccccagtcagcttcgctgatagcccctcatcagagggggctcaagcaaggtcattccacggacttgagcgaactgaccggctcaatccggtcaagcactgggttggtgaacagctgcaccagcagcgcgaatgccaacgtgaccgccacagcaatcgcatagctgtaccaatgcacttccacttcaaagtacagtgacggcatattcagcgcagccgtcagaagcccgccaatccagcgaccgagcggcaatccgaccaccactcccatgccggtcagaatcatcatctcgcgattcacgtagttgtgcacttcacggtcatagaagcccagcaccttaagcgtggccatctcgcgtacgcgctcggatacgttcgtgttggccagcgtaaacagcaccaccaacgccaatccgccggcaagccccacaatcagcgccaccacggcggccatcaaatcgaatttgaacgtagcctccagatgcgcacaactcacggccttcaccaccgacgattcctcacccagccgatccgcatactcggcctgttccccatcgggacccttcagtttggcaagcatcgcgttccaagtcagagtggaagactcaccatccgaggcagatgagtcaatgtcatgtgccgcaaatttctggtcgtacagccgctcactgatgtacacatcggatccgatgaggttgcgtaccaccgcggcgacctttatcttagcgcggctactaccgccgttgctcacggtaacggtatcgccagtgtgcacgcccaacgaattggcagcggattgcgccacaatcacaccactgtcatccagcgtcacagtgccgccacctgatgcgccgaagaagttagacagtccaaaccatccctcatcgccggcctcttccaaggtgaccatatcgttcaatttgttcagcgaattattgggtaccgccatcaattggatggtttcgctttcctgagcagcattgctcatctccgcactatccacgcgcaagttcaacgtttcggtggtccgcccatcctttttgacctgcttgcgcatcgcggccgcatcatcgtcattcgacaccaccatcaagtcgtattgatagatctgcccatactgtttgacgccgatggtgtccacggtgtcgttaatcgcaaatccgcagataatcagtgcagtgcagccggccacaccacccacggtcatcaacaggcgcgacttgaaccggaagatattgcgtgcggtgaccttgcccaagaagctcagcctgctccataccggcctgatacgttccagcagaatgcgggcgccggcctttggcgctttcggtcgcatcagcgcggcaggtgtatgccgaatttcgctacgacaggcaagtgcggtggccacacccacaccaaccacgaacaataggatgccggcggtgccgtacccccagtcgtattcaagccgcacgtccggcaatatatacagccccttaatcacaatcagtaggaatgccgggataccaaggaacccgaccagcaggcctatgccaccaccgactaggcaagcgagcaacgcgaacagcaagtatcgcagagaaacgaccatgccgccatagccaagacccagatacgtgccgataagtccgcgatcttcttcgaccatgcgggtcatggtggtcaagctcatcagcacggcgaccagcaagaacaccaccgggaatgcgcggcctatggactcgatggagctgacgtctgacttgagcgaactgaatccatcgattgaggaacgcgtctgcacgtaccagcgcgcgttggccacgtcgtcgatacagcgctgctgtttggcgaactcgctctccgcctcgctgcgtttctcatccagctcttgttgggcatcctccagctgctgtttgccgtcctcaagctgctgttctccgtctttcagctgcttttcaccctcttcaagctgctgtttgccgccggccagttgcgcggcctgcgcttcaagctgcgccgaccgcgtttccagttgtgcggcattcgattcgagctcggctaacttggcgttgagctccgcttctccggctgcagcttcctgttctttggccgttaactgcgcattctgctggtccaaggtgttctgcgcgggggcaatcgtgccatccaaggtttgctgcagttcggttttttgcttgattgcgtcgctgcgctgcgattgcagttcattctgtttggcatctaactgttgtctcagcgaactgatggacggcacgtcgggcacagtgattcccagactggtgagcagctgtttcacagtctgccatgtggatgaatcgatatcgatattcggatcgagctgggatagcagatcatcggcttgctggataagctgcagcatctggtcaagttgtgccacaccttggtcgatttgcgcaatgccttgttcgaccttgctccggttggcggtcagctcagcctgcgcggcatcgagttgttgcctggcgctggtgagttgggctttgccggactcgagctgcgcgcgggcatcggctatctgctgacgaccttgtgcaatctgctgacgcgcagaagctatttgcgcgcggccttcggctatttgccgctcgccgtcagtgatggaggctttgttctgttcgagttgcgttcggctctctgcgagcttcgtctcgttggcctccagctcagcacgattactgtcgatctgctgttggccttcgtcaagctgcttgagcgcatcggccttggctgcatcgagcgtgttctgagcacttgtgacgatttgttggcggcgggctttctgccgctgggtttgtatctgactctcgatgcggtcagccacggttttgattgcggcatcgtagtcatcggagaacgtgtcatattgggacgcgcctgcgaccgcaatggatattgccgtgtatacattgccggtcacgccatcactgggcgcaaagaacacataatcctcggacgaggtggaccggaacgcggtcatgccggaatagccgactggattgttgaggtcgcttgggtcaagcactactgcggtaatggtgagttctgtggggaactgcggggactgctctttttcgttgttgctcgtggtggcgtcttccgcagcacccacggtgtccgtatctccatcagagcttttactggagccgctgttgctcttatcctctgcgcccaccagaacggttgaggatgcggaccgcggcgtcacagtgaggtcatcgccaatctcaagcccgctgtcgttgaggaattgctgcgtaaccgccacttcgccggccttgctcggcatatccccttgctgcagatacggctgatccaaaccttcggtgccgatttcctgcatggtgacggtcttcttcgtgcctttcaccgtagcggtcaccgtctgcgagcgctccggctgcacggtttccacaccttcgacgcgacgcaacgccgctgcatcgtcaccggtcaaaccgtaggtggatagcacctgcaagtcgtgcagtccttgctgatcgtaaaagcggcttgcagccaaaaaggcatcacggcaaccggcgtagatgccggtcagcacggccacaccgagtagggtgatgacggcgatagacacgaatcgtttccagctgcgcagccaacaacgcaaggcatctttgacaaacacggcggagacgctggatccgcgatcatcggattcagattgtttcacgggacgtttcacagattggcttctctgtttcacgagatgtttcacaggtcggccacccgggaagccggtatgagaatgccttgccgttgccataagaaccgcctaccactcgatgtctgcgatgggctgcggcgcagtattgatttcctcgctggtcacggttccggaacggaagtgaatcaccttgtgagccatcggcgcgagcgcggaattatgggtgatgatcatcacggtcattccctcgtcgtggcagatatcctgcaacagctgcaacacttccttgccggtctcgtaatcaagggcgccggtcggctcatcgcacaacagcagcttcggcttcttggcgattgcgcgggcgatggagacgcgctgctgctcgccgccggacagctggcccgggaagttattcatgcgctcccccagtccgactttgcgcagcgtttcagccgggtcgaaatggtcgggacaaatctgcgaggcgagttccacgttctccagggcggtgagatttggcaccaagttatagaactggaatacaaagccgacgtcgttgcggcgatacgtaatcaagtctcgcttccgcaagcccgtgatatcacgctcgccaaccaccacacggccggaagtcgcagtatccataccgcccaaaatattcaatgccgtggttttaccggcaccggattgcccaagaatcactgtcagctcgccctgatcggcggtgaaacttgcctcatcaagcgcgcgaatcgacgtgccgccagacgggtattccttgaccaccttgtcaaattcgatatacgccatcgagcacctccagcgatttcgccgcggatggcctgcaatcgcagccaccaaaatcccgtcgtagtatccattgtaaaacaatgcttttagccactcacagaatccaatgggagtaagagccccactcccactacgtaactgcccaaagctgcgcaatgctccctcagcgaagcacccacccactcaaccgaaaaaacatcccgttcacggcccctcagcgaagcagatgttcgaacaaatcgcggttttgccccactgagagcccgtcagcgaagcaaatcccccaaccaaccgaagaaccaccccgtccacggaccctcaacggggcaaatcccccaaccaaccgaagaatcgccccgctgatgccaactcagcatggtctccgcacggtcttgtggaaccaatcggcatacaataccatcgttgagcataatcgctgacggactacaccgccgcccgcggcttacgagagaagaacaacatgagcactactgacgcgcctaagaagccgcgcgaaaccgacgatgtgccggtacccgcgaccctgcgcaaatcattgaaaaatcgccatatccagctaatcgccctcggcggcgccatcggcaccggcctgttttacggttccagcgaatccatcgccctagccggcccatcgattctgctggcctacctcatcggcggcttcgcaatcttcatgattgtgcgtgcactgagcgaaatgtccgtcgaggaccctaaggcgggcgcattcagctactatgccacccgctactggtccaagcgcgccggcttcatctccggctggaactactggttcaactacattctcgtttcaatggtggaactggccgtagttggcagctttgtgaactactggttcccggcaatcccgacgtgggtctccgcagccgtgttcctggtgctcatcaccgctgcaaatctgctcggtgtttccaagttcggtgagttcgagttctggtttgccattatcaagatcgtggccgtaatcgccatgattatcggtggcctcgcagtcatcatctttgccctgcctaccgcctccggcatcaaggcaagcttcgccaactggttcaccgtgggcggtggtttcttcccgaacggactcatgggccacactgataatgggtggaccggtctgctgatggcactggtcgtggtgatgttcagcttcggcggcaccgaactcatcggcatcaccgccggcgaaaccgaagatccgaagatcacgattccgcgtgccaccaacgacatcatctggcgaatcctcgtgttctacatcggcgctttgggcgtgatcatggccgtggtgccgtggaacaccatcgatggcaagtccagcccgttcgtgcagatcttcgactccgtgggcatccacgcagccgccggaatcctcaacttcgtgtgcctgaccgccgtgatgagcgtctacaactccggcttgtacgccaactcacgcatgctgtactcgctggccaagcagggcaacgcccccgcatacctcggcaagctcaattccaagggcgtgccggtggccggcgtgctgacctccgccgtgattaccgccatcgccgtggtcgtggtgttcgtgtggcctgaattcgcgttcaactatctgatgtcgattgccaccatcgccggcattatcaattggacgatgattatgttcaccgagatgaagttccgcaaggtggtggaagccggtggcgctccggaagactccgacctggccggcaagtccgggcaggaggcgctcgacgcgattcacttcaagctgccgttcgccaaggtgaccccatgggtggtgctggtattcctggcactggttgtggtgttgatgtgcttctccgccagctaccgcatcgctgttatcgccggcgtaatctggctggccatcctcttcgtggcataccaaatcactcaggcaaagaaataatcgccctatggcaataagaaaaggccactgttcctccgcaacggccttttcttattgttgaagatacggcttgaagacgcgctcggtaacggggatgtggagcatcagcatggtgccgtagccgaggatcaccaacaggaacaagcctccaggcatatagaaccaactgcccaccagcaacgccacgaacacagcgtccacgacgacaagcgccgcggtcatcgcgatatgggaaataccgaaaataaaggcgttcttcagggtaccggccacggtgttctcaaaccgggcctgcaacgcgaatacccactcaaagccgatgagccagatgatggtaagcgcgaacttgatgatgagcagcggggtgaattgcagcacaatccacgaccaggccaaagcgatcagcaccaccaggaacggcagccacagcaatgtggccttgacgaaattagccttgaatgagcggaagtagttggctgtgacgcctttgccctctccctcgatggagcgacggcaagcatcatggccggcagtcagagccgcaccgatggtgataatcggaatggatgtgaccagcatcagaatattgacccatacgccatcgatgagattgctccacgcgtgcatgaatttcgaatccggtgccagccagttcatcagttcactccttgtaccgctcggctcccctccctgaggggagctgtcggcggaagccaactgaggggagtaacctgcgcttcatcaaggctcccctcagtcatctacgatggcagctcccctcaaagaggggagccagattgttgggattcagcctttcactgcgcccgccataactccactcacaatatacttctggcataccaggtagaagacgatgatggggatgattgccagaaccaggcaggccatcatggctcccatatccacagaaccgtaaccgcccttgaggtactgcacagccaccgaaatggtcttgtacttacctaggtcgagcgtcaggtatggcagcaggtagtcgttccagatccacatggcttcgaggatggccaccgaaacaatcgacggcttcataatcggcaccacaatctggaagaagatacgcggaacggaagcgccatcaatcatggcggattcctcaagctcggccggaatgcccttgatcacaccggtgaagatgaacacggccagaccggcgccgaatccgaggtacacaatgcacagaccccatggggtattgagcttcagcatgtcagcaatcttggagagggtgaacatcaccatctggaacggcacaatcatgttgaacaggaatagagtgtagagaagcttggccgcccagttgttcacgcgcacgatccaccacgcgcacatcgaagtacacaccagaatcaggattaccgagccaaccgtgatcagcagcgtccaaccgaacgaggcgaagaactgcgtagtctcaacaccgcgcacatagttttcgaatcccacgaacgccttgcccgccggcaaagagaacgcattcttggagatgtatgccttttgcttgaaggagttgatcaacaccagaacaatcgggaagatccagaatagagagacgacggcgaacaggacagtccacaacgcgccgtgcttcacaggcttgttctcgttcatcaggctgccacctccttgctcgtggtgagcttgttctgaataagggcgattaccgcaaccagaatgaagaacagcacggccttcgcctggccgacgccctcccagcccatacggccgtagaaggtgcgggtgatgttcatcgccaggccttcagacatattgctcggcgcaccattagtcaacgcgaggttctgatcgtacagcttgaaaccgttggtcacggtcaggaaggagcagaccgtgatagacggcatcatcaacggaatgatgatacggaacatggtctgccgtccattggcaccatccacggccgccgcctccagcacatcggtgggcagcgcctgcaagccggcgatatagatgatcatcatgtaaccgatttgctgccagcacaccagaatgaccaaaccccagaatccgtaggatgccttataggtcaaggcgcggccccagtgggccagcacgccgttcagcagcagcagccagatgtagcccaagataatgccgccgatcaggttcggcataaagaacaccgagcggaacagcgtggagcccttgatcgccttggtcagcatataggcgatggcgaaagcgatcacgttgatcacgatggtggtcacgatggtgaatgaagtggagaaacccaatgcgtgcaggaattccttgtccttcagcgccttggtgtagttcttgagccctatccattcgccatcggtgacggtggtgaattcgcagaagctcaagtagacgcccatgatgaagggcaccaaaaacccgatgatgaatgcggcaaacgtgggtagcgcaaacagcgcccaccaccggcgtattgccttgcccgccatgctgatcatgactttcctcctccttgagtccgcaacactgcactgcatcgtgcgccgagcgcggagttcaactcaattccagcccgtcaagcagaacacacgttcgcgaatcccgccaatcaagcctaagcttcatggtaaacactcgacaaccatatgtcaaacgttgtcatttacagcgtttctacatgcaactacatcccatcagagcaattatctttcacttcacaaaatagctaaattccaacgtttctgcataataatagactatctgcaaacgtttgtaatacaatcgttgtcattgcgcaaattgcccaatcaccatgtacactggagccagttgtgtccgcttcgcgttttgcaaggcaaaggggctgttatgaccacaagtatccaagatgtcgcccagaaggccggcgtatccatttccactgtgtcacgctcgttcaccagaccggatctggtctcgactaaaacccgcgagcgcgtgcttgccatcgccgacgaactcaatttttccctgtcccgttcggcagcggccttgaaatcaggccgatcactgcgcatcgcggtactgatgagtggtcacattcgcctatggttcaccgcttcagtaattgaggggctcaacgaagtgctgcatgctgcgggatacgatatttcggtattccaaatctccagcatcgaggagcgccgcgaattctttgaaatgctgccagtacgccgcaacgcggatgccgttatcgtggtgtctttcgacatcgacaataacgaaatcactcagctggcctcggcggatgtgccgatcatcggcatcaactcggtcgatcctgaagtgcgtgggttcaccgccgccgtcaacatcaacgacatacagggctccacgctagcggctcgccatctgatcaaccttggccaccgcgatattgcatacatcagcaccgaccgcgatgtgtcgctcagcttctccgtgcaaaaccgattcggcgccttcacggaatgctgccgcaacgagggcatcgaaccgcaggtcatcgtctgcaaggtggatgatgccggccgttaccaaatcagcgatgtggtcacccaactgatgagcctgcctaagctgcccactgccatcgcctgccaggaagacggcattgctctgccgctcatgttccagctggagcgcaacggtctctccgtgccgggcgatgtatcgcttatcggctatgacgacagcttctacaccgacgacatcggcctgaccacgattcgccaggatccagtaggcatggcccgcaaagccgcgcacatgacgctcgacctcatcgaggaaaagcccatcgatgaaccgtacgtcgtggcgccagctcaccttgcggttcgttcctctaccgccaagatccgctagccagaacccgctagcacaactgccggccagcaaccaaacgccaagcaacactggaggccaccgcccaaacggacggtggcctccagtgatataggaaaggagacacacaaggtggagtagggaggtaagcgcggcgccccggagaaggaaattgggtagggcgccgcagattcagttatcgaggttgatcactgatgccgactggaatcagtgggacgcctcgtactcggaagcccagccgtccacaaaggcggtcttgacggcgtcccagttgccggtgccttgagcgtactcgagcagggcctgaccgatcttgttcttccactcttcggacggcatcatggtgaagttccaagagacctgggttttaccggacttctgatcctcaacagcggcctcggtcagcgggttgtcgctcttgacgtcatcgaaggtcttgaacggcgtggtgaagcccatgtcctgagaaagggccttcttgccggcgtcggaggtaatcacccaggacaggaagtcctcggtggccttcttgtcggcatcagaagccttgtcgttgatgcaccagtagttctcggaaccggtggccagaccctgcttctcctcgcccttgacaccgatgtaaatcggcatcatacccacggattcggccttcatgccggccttctgcaggtcggtccaagcccaagtaccgttctggtagaaggcggcctcgccgagcgcgaactcggagttggcgtcatcgccggtcttggcgctgagctgagtgggctcagtggtggaatcagtgatgtacaggtcgaagatcttcttgtagttcggcaggtaggtgcccttgatcttggccggctgctcggtgacgttgtcatccttgaactcgtagtaaagcggcaggttggccaagtgggtcttgaaacgccagtcagagctggagtcaaagccggcggaggtgaatgcacccttgatgccgagctcgtccttgcgggactgcatgtcgtcggcaactgccttcagggtatcgaaattatcgatttcgtccatggaagtggccttggctccgtcgagggcgaagtacttgttgaggatgtccttgttgtagatcaggccgtaggtttccatcacgtacggcacaccgacaaccttgtcgccatccttgagagccacatcctggttggtgagctccttgtacacatccgttttggacatgtcggcggtgtacttcttccagttctggtaaccgaccgggccgttcacctggaacagggtcggggcctcggtcttggcaatctcagacttcagggtctgctcataggtgccggatgccgcggtctggaccttgacctcaacgcccttctccttggtgtattccttggccaaggcggcccactgatcagccgcctccggcttaaagttcaggtaatagaccttgcccttggagtcgtcgccggaagtggagcttccacaagcggcaagggttccgagggacattgcagcgatggccgccactgcgaccgctgacttcactgtacgattcatcatcgaacctttctctttcatcgtcgacccgcccgatctccggtcggccagagtgccgttagcagcaccctcacgactatcgacatgacctattgtgcaacggttcgcgcttttttgcaaacgatggcattatcggcgcgccaaaaagtgctacagaagcatgtgcagttgaccaatttcccgataaaccagtcggtttcagccggcagcagcaatgcaagcgttggcaacaatgagagcgctaacatgtaaaatccatacctcatgcgcggccatttaccccgttgcgcaacacgccgaagccatcgtttgcagaggtgatgacgcacacgccccgtccgctcacggctcaaaacagaacgcagtcactgcatttgcgccaaagaaacgtcaaaacgtcaagcctgcccgctacggctcagctcaggcattccaccgttcgatgacgttatcgcccttatacacgctcagcaccgagtaatgcgcagtatccaatcgcagcagacgcgcgaattgcggatccacgttcagccattgcgaggtcaggatacgcagaatatgggcatgcgcaaccaatagcacgttccgccccgactgcagcaacggcgtcacttcttcgatggcagtcctggcccgcgccgcgacctcgtccagtgtttctccagctccggaatgcacattgacctgctcaccatccggcaaagtatccacccaatcgccctccagcgtgggggttagcgagcgcgggccgtcacgccacacatcccaagagaacccactggcttcgctcacctgttgacgggtacgcccttcagcacggccataatcccactcggcgatgccgtcgagtatgccatgctgtgcaaaacctgcgagttccgcggtctggcatgcgcgtttcaacgggctggagaacacacactcagggtcaaaaccttcggggaaggcctcgcgcaatcgcgcccccgcatccatagcctgctgcctgcctacctcagtcagagggatgttcgttcgcccggtatgctgcccggattcactccaaaaagtttgaccatgtcgcagcaataccaagaaccccgccttgccgcaagatgcatcaacagccacagtgccgtccatgtgttgttcgctcatgcctccactctagtctgcacagcttggcaactccaccgaacatcccatcttttgcgattagactgatagtcatgagtgacgaaacgaacaccggtattgcctctgacgccgatcgcgttgtcgagggactgcaccgcatcgatcagaaggtggacgacttgcgcaaccaacgtctcaacgaccccgactctctgggcgacaagctcgtcaagtcggcagtgccggccttggctggtctggttgcgggcaagctgtttcagatagcctgggacaagggcgccgcgcgccgcaatgtgatcaaaggactggctgccgacgcaccgcaaggcctggccatgagcttggcatttgccgccatctcagcggcattcggcgcaatagtttcgcagttgtccaatcagggctctcaagcgtttgtcgagcgacgccaccgcaaggcttctcgttaagcgcctgaaccgctggcaccaacgtctcactatgcatatttcactgtgagacaaccgacatcccctatgcacacgagccgtgcgacaatacagtcatggctaccaatgcaactatcgaaaccctgctgaatcgtcgttccatccgcaagttcaaggacgagcccattgacgacgacgccactgccactctggaaaccgtcgcacagcacgccgcttccagccagttcctcaatgactggtccgccatccgcgtcagcgatccggcaatcaaggcccgcctcgccgaaatcggcaaccagccgtatatcgccacagccccgctgctgtacgtgttcgtcatcgacgagcatcgcaacgcgcgtatcgcccaacgcaagggcattgacccgggctctgacgaattccatctcaagtacagctatcgcttcactcaggcccagaacgacgccgtgctggctctgcacgccatggagaccgcggcctactcgctaggtctcggcggcgtgattctcggctcgctgctcaatgacatccccgctctgatcgatctgctcaacctgccggaatacacctatccggtgctgggtctggctctcggcaagcctgatcaggagcccacgttgaagccccgcatgccgcgcagcatgcagttctttgacaacacctatcctgccgacgccgatggcatgctcgagcaattgcctgatttcgacaacaaggtgcaccagtattacgatttgcgccagaccgatcggcccgtggatgcgttcagcgatcaaatcgcctcggtgagccgtcagggcgtcagcggcaaaacactgctggacaaggctgcagctcaaggtttccagctggataagtaatgcgccagcaccacccagtgtccagaacatgcatccgccattcggacactgggtggccgttttttcgccttgcagctgcgctttatccgataaatcacgagcggccggaatagactgcattatggctggattggagcgccgaggacaagagaccgagagggggctggatgcgcacggtatggcaagtatttctgcgtgactgcaaacgcattctccgcaatcccgttgccgcagtggtgacattaggtgtcgcagtactgccttccctgtatgcatggttcaacatccttgccaactgggatccttattccgccaccggcaacctacaagtcgccgtcgccaatgaggaccgcggcaccaccaatgatctggttggccatctcaatgccggcaagcaggtggtcataaagctcaaacataacgaccaactcggctggcggtttgtgagcaacgaagagcaggccgtacagggcgtgcaaaccggcgactactacgcggcgattgtgctgccaaaagacttcagcgccagcctggtcgattcgttgaccggcacctccaaacaaccgaagatcaagtactacgtcaacgagaaaaagaacgccattgccccgaaaatcacggacaccggtgcaaccaccattgacgagcaaatcaactccacattcgtaaccacggtgagcaacaccgttgccgccgccatctctcaagcgggagacgacctcgaccaagccaccaatagcacacaaaacaatgtggtcgccgatctcggcagtgtgctctccaccattgccacggtgcaggacgcgctcacggatctacgcaccacattggatcagtcagacacagctctggccgacgcccgcagtactacggcctcattgcagcgcagcatcaccgcagcgcagcaagcctcccagcaatccggagcgttgctggccgagacacaggacggctcgcaagtattcgcggcctcgctggtaagcgcactggacaccagctccgcacaactttccggactgacggtgaacgtcaacaatgcagccggtaccatcaatcaatccttcaacactgcacaaaattccgtcgacactattaccaacgccctgaacagtccgctcgacaaaaccgccacttccctcgacacgttgaaagacgcattgaataaggccggcatcagtgcagacaccactgatccgaccggcaagcgcatctgggatcacatcaacgcggtcgatgacgccatcagcacgcagcaagcgaaaatcaacacctttcacgaagacaccacccgtttcatcgactccggcaagagcgccaccaccaatctttccggtgccatgagcggcaccgccaccggcggcattgcggcgttgaacaccgcacggagttcgctgaccggcacagtgatgccgtcacttacttcatcgctgaacagtttcgccgcgctaaacggcacgctgggcggcacgctgacctcgctctcaggcactcttgaccagaccaatggcctcttcgaccagctgtccagcaccatcgcccagaccagaaccaccataggcagcgcgcaggattccttgaaccagatcatcgatgacgtatccaccgtgcgcaccgatgttgccacgcttgatagctccgccgtctaccagaagatcagggacacgatgcacttggacgataagggattcggcgaattcatgggttcgcccgtcaccctgaccaccaaggtcgtgtacgccatcgataactatggctcggccgtcaccccgttctacacgaatctggcgctctgggtaggcggcttcgtgctcatcgccatctataagcttgaggtcgaccgcgaaagcatacgccggatcaacgccaagcaggcctacctcggccgatggatgcttctggtcaccattggttttctgcaggccatcattgccaccgtgggcgatttggtcctcggcatccagtgcgagcacccattgctgttcatcttggccggcatattctgctcgttcatctatatcaatatcatctatgcgctggccgtggcattccgccatatcggtaaagccatcgccgtgattctggttatcgtgcagattccgggagcttctggcctctaccccatcgaaatgatgcccgacttcttccgcaaactgcacccgtggctgcctttcacctacggcatcaacgcgatgcgcgggccgattgccggcacatacagcaaccattactggctcgacatgctgcacctgttctggtatctgccagcagcgctgttcgtaggccttgtggtgcgccgttatgccatgaatctcaacgcattgttcgaccgccgcttgggagacactgatctgatgatcaccgagcacaacagcatggtcaacgaacaggtcagcctcgcatccgtgttccgcacggtttccgacagcaaggaactcaaggccatcatcacccgccgtgcacaccggttcttcgccagatacccaatgatgattgttgccggcttggcactgctgactattcttccgttcgtgttcctcatactgctgttcgtcacacaggaaaaaatcgcgatgcttacgtcgtggattctgtcaatcatccttatcgacgcatacctgattgtggtcgaatacactcgcgaaagctacgcgatgcaactgggcgtcagtgcgatgaacgccgacgaattccgcgatgtgatgctcaacggctatgtatggcgccgcttccgctcccatggtcggcatgaggcagcatctgcggaatccgctgtggataccgacccggatatcggagaggtcaccgagcaacttacgccgttcgagcgaacgggctccactgattcatcggattcatcgaaatcatcggagttcaccatcaccgacacaaaccccgcacagggaggtgcacgatgaagctcatctggaagatcttcgtacgcgatgtgcgccaagccacacgtaatgtaatcgcggtgatcgtggccatgggactggtaatcgtaccggcgctgtatgcctggtacaacatcgccgccagctgggatccatacggcaacaccaaggcactcaaagttgccgtggcgaacgtcgacaagggatataagtccgatctcatgccaatcaccatcaacgttggcgaaaccgtcaccaataccctgcgcgccaatcatgacctcgactggcagttcgtggacaaggacgaagccatcgacggcgtgaattccggcgcctactacgccgccctcatcatcccgaagagttttagcgccgacatgatgacagtgttctcgccaaccatcaagcacgcgaaaatcgaatactacctcaatgagaaaatcaacccaattgcaccgcatatcaccgatcaaggcgccagcacggtagccaccaccattgaccagaccttcgtcaagacactcgccagcgtggcacttgatctggtttccaatgtgtccaactatgcgcaaagcccgcagatggcgcagtacgtcaacaatgccaccagccatatctccaccatgtcctccaggttgactatcgcggcttcacaaatggattcctatgccaacctcttaggggcggccaacggcatcattgattcgaccgacaaattgctgggatccactggctctgccgcaaacaccaccaaaaaggcattgaagcaaacccgcgacggagtgaacagtctggattccgcattgtctggcgccgccagtggcgtcgaaaccgccctgcaacaggccggagctgcatacgatacggtcagcaagcagcttgataccgcatttgccagtattggctcgcaatccgcccaaatatccggcacgctcaccgacatgcaaaccaaagtgaacgaccaatccgcaagcttcggcacctacgcttcggcattgcgcgaacttgccggcaagtcgtcatcactgcccgccggtggagatacgattgccaagcggctcaatgccgcagccgaccaagccacgcagacgcaacaagatctcaagaatgtcgccgacgatttgggccgtgccgcacagagcctggttgatggcacagcggacaccgaccaaacactcaaagacatcaaggcacaaatcgccgccgcaaaacagtcagttacacaggccgcgaacgattatcaaagcacgctgaagccacagctcaacaatctgaccgcatcgatgggtgacgtcgccgatcaggcaagctcggttattgatgggctgtcttccactgtcaacagtgtctccaacctgtccggcggcatatcggccggcctgagagacattcaaaccacgctcaccgacgccgcaggcaacctgaaccattcggcaagtaagctggacgatttgtccgcacagctttctggtatcgccagtggtagcagtactgatctggattcgattaccacagccgatcctgatgccattgcttcgctcttgtctgctcccgtggcggtagatcgcataccgctgtacccagtggccaactacggttccgcgatggctccgttctacacgattctgtctatctgggtaggtgcaatcatcctggttgccatgatgaaagtctctgtttccgatcatgagaaggccaagattcttgggttcggcaatgacctgcctcttggctcggaggtcggcttgcgcgaggcaatgattgccggacgggttgccggcccggctgccgcattggacgtgttgacgaagcctcgtgccgattcgcctggtaatgcgcggcagtttggcctgcacttgtatcaggagtacttcggccgatatatgctatttggattcctggcactgttgcagggcacactcgtatgcctaggtgacatgttctatctcggcgtgcaatgcgagcatcccgtgcagttcatgatggtcggatggctgtccgcattggtcttctcgaatatcgtgtacacccttactttgtcgtttggcgatatcggcaaggcgattgctgtggtattactggtgatgcaggtggcaggatccggcggcaccttccccatcgagacattgccttcgttcttccaggcggcctcgaaatggctattgttcccctatgcagtggacgcgatgcattcggcaatggccggatcatacggtatggaatattgggtctccatgggcaagctcgcccttttccttgtgccttcgcttctacttggcctactgctgcgcaggccggtaatacgattcaatgattggattattcgcaacctcgagagcaccaaggtgatgtgaggcaccgaggcaattactgcttggtggcgatgttgattcccgttcctggaccgtgacatgtcgttcggttcgagtggcaattgctattgagcactactggactgcgatgttgcttcaccatcttgagagagatgacatacggctgccggaaaaggaaaactacttccgccgaggcttataccctttcttgcggctatgcggcttaagctgctggttcagcggcacatggcgatagctggattgcggatcacggtgcgtcaaatgccagcacccgcagtattcgcagcggtacacccatagctcggccccgcgctcaatcagactttgatcggcggctcgctgggcttgcgccttgtcgtgatacatgatcttgttcgacgtagcgcaacgtttcggggtgaagtagtgcataacggaatatcagtatagttggaggataaaaaaatgcccccggccgtgtggtcgggggcattcgtaagttgggtgcggcggcgtgctactctcccacaccctgtcgggtgcagtaccatcgccgtgccaggccttagcttccgggttcggaatgggaccgggcgtctcacctgggccatggccgccgcaaatcttctcttgtacggtcagacgctggggtctgccggcttggtggcggcctgggaaccggatggcggacgcgatgcgttggttcgtcttgtgttcatcccgtgctcattgtcgtgcgggatggttcgcagcaggatgcttgcgttccaaccggggttggattgttgtgttgcctttcgtccgttagtaccggtcggctccacccctcgcggggcttccacgtccggcctatcaaccacgtgttctgcatggggacttcaaggacccgtagtcctatggaatgcttatcttggagcaggcttcccgcttagatgctttcagcggttatcccttccgaacgtagccaaccggccgtgccactggcgtgacaaccggcataccagaggttcgtccacccaggtcctctcgtactatgggcaggcctcctcaacattccgacgagcgcagaggatagagaccaaactgtctcacgacgttctgaacccagctcgcgtgccgctttaatcggcgaacagccgaacccttgggacctgctccagccccaggatgcgacgagccgacatcgaggtgccaaaccatcccgtcgatatggactcttgggaatgatcagcctgttatccccggggtaccttttatccgttgagcgatgccgcgtccgtacaccggcaccggatcactagttccgactttcgtccctgctcgacccgtcagtctcgcagtcaagctcccttgtgcacttacactcgccacccgattgccaaccgggctgagggaacctttgagcgcctccgttactctttgggaggcaaccgccccagttaaactacccgccaggcactgtccctgaccaggatgactggtcgaggttagacatccaatgcgaacagagcggtatttcaccttgcggctccaccgcggctggcgccgtggcttcgaagccttccgcctatgctacacaatccacaccgaatgccaataccaaggtatagtaaaggtcccggggtcttttcgtccttctgcgcttaacgagcatctttactcgtactgcaatttcgccgagctcctggtcgagacagtggggaagtcgttacgccattcgtgcaggtcggaacttacccgacaaggaatttcgctaccttaggatggttatagttaccaccgccgtttaccggggcttgaattcaccgcttcggccgaggcctgacggatcctcttaaccttccggcaccgggcaggcgtcagagcgtatacagcggcttgcgccttcgcacgctcctgtgtttttggtaaacagtcgctaccccctggtctgtgccacccccaaaagctccgcgggcaagccgcttcaccatcgggggtctcccttaaaccgaaggaacgggagtgatttgccgagttccttgaccaggattcgctcgatcgctttggtattctctacctgaccaccagtgtcggtttggggtacgggcggcatgccgcctcacgccgaagcttttctcggcagccgggatcaccggatatcgcgcccaacggcgcccatcatcgcacctcgcccacgcgccccacggatttgcctgtgggacgggctgcgtgcttgaccacggaagaccacctccgcggccggctacccttctgcgtcactcccgcgctgacctactaccgttacggtcccaacaggccagggcatccggctcccgaaggagacgtaagcccggacccggaggttagtactcgcggattcggttttgccggttgcatgccggtacgggaatatcgacccgttcgtccattcgactacgcctgtcggcctcgccttaggacccgactcacccagggacgatgaacgtggccctggaacccttggtcgtccagcggacgggatcttcacccgtctttcgctactcatgtctgcattctcactcccatgcggtccacggccggcttgcgccgccgcttcgccccgcacgggacgctctcctacccagtagcaaagctactgccgcgtcttcggtggtgtgcttgagccccgctacattgtcggcgcggaaccactagaccagtgagctgttacgcactctttcaagggtggctgcttctgagccaacctcctggctgtctatgcgactccacatcctttcccacttagcacacgcttggggaccttagacgacgatctgggctgtttccctttcgacgacggagcttatcccccgccgactcactgccgggatacgcatcacgggtattcggagtttggttgctgttggtacccgatatgggcccgcaagcatccagtcgctctaccccccggatgtaatcgatccgacgctgcacctaaatgcatttcggagagaaccagctatcacggaatttgattggcctttcacccctagccccaagtcatccccccggttttcaacccaggtgggttcggtcctccacacggtcttacccgcgcttcaacctgctcagggctagatcatcccgcttcgggtccaggacacgcgactcaaacgccttttaagactcgccttcgctacgcatacgccacacggcttatgctcgccacatgccactgactcgcagactcatttttcgataggcacgccgtcaccccacaagagggccccgacggttcgtaggcgcatggtttcagagactgtttcactcccctcccggggtacttttcacctttccctcacggtactcgttcgctatcggtcagacaggaatatttaggcttatcccacggtcgggacagattcgcacgggattccacggggcccgtgctacttgggagacgcgatcgccagaccatgcgcgttcgggtacggggccctcaccctctgcggcccggtattcaacccggttcccctggcacatggttttatgcaactgacggccggcccgtcggagccggcaaacgcgatccctctacaccccgcgcgcaacccccgacgggtatcacacgcgcaaggtttggcctgatccgctttcgctcgccactactcacggaatatcctttcctgcaggtactgagatgtttcacttccctgcgtaccccccgcacacggcggtaccggcccatgacggccggtgggttcccccattcggaaatcctcggatcaaagccctgttggcggctccccgaggcatatcgcagcctcaaacgtccttcatcggtcctgtctgccaaggcatccaccatacgcccttgcaggcaacacgcaccacacggtgcgcatggccgcaaggatccttcctagcaaattcccagacgacaaatcatcacactaaaatgatcacaaaacgatcgaaacaaacactaaaaatagagttcgattcgaaatcaacagcaagaacaaagaatcaaaagaaacttcgtcttgctcgcgtccactatccagttctcaagccaccacgcaccaccacgccgtccggacgggaccagcccgccatcagacacgatgggcatcgaatcgcgccaggccaaagcctggggtggcgatccgggagcccaaaagcgcatccgcaccactcccgcggaacatcccacgacggacgaaccgaaagcccatgatctcttccacaccagcagccccaggccgccgcgactgccgcggcgtcggggttcgcaccgccggacgaacatccggccgtattctccgtagaaaggaggtgatccagccgcaccttccggtacggctaccttgttacgacttagtcccaatcacgagcctcaccttagacggctccctcccgcaaggggttaggccaccggcttcgggtgctgcccactttcatgacttgacgggcggtgtgtacaaggcccgggaacgcattcaccgcgacgttgctgattcgcgattactagcgactccgccttcacgcagtcgagttgcagactgcgatccgaactgagaccggttttcagggatccgctccagctcgcactgtcgcatcccgttgtaccggccattgtagcatgcgtgaagccctggacgtaaggggcatgatgatctgacgtcatccccaccttcctccgagttaaccccggcggtcccccgtgagttcccggcataatccgctggcaacacggggcgagggttgcgctcgttgcgggacttaacccaacatctcacgacacgagctgacgacgaccatgcaccacctgtgaacccgccccgaagggaaaccgtatctctacggtcgtcgggaacatgtcaagcccaggtaaggttcttcgcgttgcatcgaattaatccgcatgctccgccgcttgtgcgggcccccgtcaatttctttgagttttagccttgcggccgtactccccaggcgggatgcttaacgcgttagctccgacacggaacccgtggaacgggccccacatccagcatccaccgtttacggcgtggactaccagggtatctaatcctgttcgctccccacgctttcgctcctcagcgtcagtaacggcccagagacctgccttcgccattggtgttcttcccgatatctacacattccaccgttacaccgggaattccagtctcccctaccgcactcaagcccgcccgtacccggcgcggatccaccgttaagcgatggactttcacaccggacgcgacgaaccgcctacgagccctttacgcccaataattccggataacgcttgcaccctacgtattaccgcggctgctggcacgtagttagccggtgcttattcgaaaggtacactcaacacaaaaatgccttgctccctaacaaaagaggtttacaacccgaaggcctccatccctcacgcggcgtcgctgcatcaggcttgcgcccattgtgcaatattccccactgctgcctcccgtaggagtctgggccgtatctcagtcccaatgtggccggtcgccctctcaggccggctacccgtcgaagccatggtgggccgttaccccgccatcaagctgataggacgcgaccccatcccatgccgcaaaggctttcccaacacaccatgcggtgtgatggagcatccggcattaccacccgtttccaggagctattccggtgcatggggcaggtcggtcacgcattactcacccgttcgccactctcaccaggcagcaagctgcctggatcccgttcgacttgcatgtgttaagcacgccgccagcgttcatcctgagccagaatcgaaccctccacaaaaaaccttcatgaaaagcatccgaacagatgactcacaaaacaaaaatcgacgagcacgtccttaaggaaggacgccctcaaaaaacctcacccctcatcaaaccctcccgggtacccaaccaccacacaagcggccaggcgaggaatgaactggcaatcattgactataaagaagtagtacaaacacgctcttgagttctcaaaccaccaccactcacccaccttgtaagctcttccggagaagaaccactcgctgagcggcagcaagggaataacttacacacatttgaggactcatgcaaatcgagcgcgcaaagataagcccaaatcgttgaaacgacaggcttcgctcggcgtgtcgaaatcgacgtttcgcacgtctctatgaacagtgtaggcctgttaatgcacgaaaaaaagtattcaaaatatattttcattggcgtgtcgccgacctatttccgtccaacgtggctcagtgccgcgtccacaatgtagaaagagcccgttatgtggtatatcgcaataaccgcatacatttttttcggtgtctgatatttcggtagatacgtggaaattggaatcgtgcagggataagcacaaatctcccggtagatgggcttctatgagtgttcagccgttgtactctccatgcacttaatatccactttatgaagctgaactgaccttgcagaactgaccatgacggcaggaaatagtcaatgcagacgtaccgcccacgatggcggttcctgaaagtatatcggccaagctttctcggattaaccgataatgtacattatgttgttctcagtcttccgttattccaatatgcgttgaagaaaaacatccccccacctggcaaagttttgcgcgcatataaggaaagccccggtggattgaatccatcggggcttcctgtaagttgggtgcggcggcgtgctactctcccacaccctgtcgggtgcagtaccatcgccgtgccaggccttagcttccgggttcggaatgggaccgggcgtctcacctgggccatggccgccgcaaatcttctcttgtacggtcagacgctggggtctgccggcttggtggcggcctgggaaccggatggcggacgcgatgcgttggttcgtcttgtgttcatcccgtgctcattgtcgtgcgggatggttcgcagcaggatgcttgcgttccaaccggggttggattgttgtgttgcctttcgtccgttagtaccggtcggctccacccctcgcggggcttccacgtccggcctatcaaccacgtgttctgcatggggacttcaaggacccgtagtcctatggaatgcttatcttggagcaggcttcccgcttagatgctttcagcggttatcccttccgaacgtagccaaccggccgtgccactggcgtgacaaccggcataccagaggttcgtccacccaggtcctctcgtactatgggcaggcctcctcaacattccgacgagcgcagaggatagagaccaaactgtctcacgacgttctgaacccagctcgcgtgccgctttaatcggcgaacagccgaacccttgggacctgctccagccccaggatgcgacgagccgacatcgaggtgccaaaccatcccgtcgatatggactcttgggaatgatcagcctgttatccccggggtaccttttatccgttgagcgatgccgcgtccgtacaccggcaccggatcactagttccgactttcgtccctgctcgacccgtcagtctcgcagtcaagctcccttgtgcacttacactcgccacccgattgccaaccgggctgagggaacctttgagcgcctccgttactctttgggaggcaaccgccccagttaaactacccgccaggcactgtccctgaccaggatgactggtcgaggttagacatccaatgcgaacagagcggtatttcaccttgcggctccaccgcggctggcgccgtggcttcgaagccttccgcctatgctacacaatccacaccgaatgccaataccaaggtatagtaaaggtcccggggtcttttcgtccttctgcgcttaacgagcatctttactcgtactgcaatttcgccgagctcctggtcgagacagtggggaagtcgttacgccattcgtgcaggtcggaacttacccgacaaggaatttcgctaccttaggatggttatagttaccaccgccgtttaccggggcttgaattcaccgcttcggccgaggcctgacggatcctcttaaccttccggcaccgggcaggcgtcagagcgtatacagcggcttgcgccttcgcacgctcctgtgtttttggtaaacagtcgctaccccctggtctgtgccacccccaaaagctccgcgggcaagccgcttcaccatcgggggtctcccttaaaccgaaggaacgggagtgatttgccgagttccttgaccaggattcgctcgatcgctttggtattctctacctgaccaccagtgtcggtttggggtacgggcggcatgccgcctcacgccgaagcttttctcggcagccgggatcaccggatatcgcgcccaacggcgcccatcatcgcacctcgcccacgcgccccacggatttgcctgtgggacgggctgcgtgcttgaccacggaagaccacctccgcggccggctacccttctgcgtcactcccgcgctgacctactaccgttacggtcccaacaggccagggcatccggctcccgaaggagacgtaagcccggacccggaggttagtactcgcggattcggttttgccggttgcatgccggtacgggaatatcgacccgttcgtccattcgactacgcctgtcggcctcgccttaggacccgactcacccagggacgatgaacgtggccctggaacccttggtcgtccagcggacgggatcttcacccgtctttcgctactcatgtctgcattctcactcccatgcggtccacggccggcttgcgccgccgcttcgccccgcacgggacgctctcctacccagtagcaaagctactgccgcgtcttcggtggtgtgcttgagccccgctacattgtcggcgcggaaccactagaccagtgagctgttacgcactctttcaagggtggctgcttctgagccaacctcctggctgtctatgcgactccacatcctttcccacttagcacacgcttggggaccttagacgacgatctgggctgtttccctttcgacgacggagcttatcccccgccgactcactgccgggatacgcatcacgggtattcggagtttggttgctgttggtacccgatatgggcccgcaagcatccagtcgctctaccccccggatgtaatcgatccgacgctgcacctaaatgcatttcggagagaaccagctatcacggaatttgattggcctttcacccctagccccaagtcatccccccggttttcaacccaggtgggttcggtcctccacacggtcttacccgcgcttcaacctgctcagggctagatcatcccgcttcgggtccaggacacgcgactcaaacgccttttaagactcgccttcgctacgcatacgccacacggcttatgctcgccacatgccactgactcgcagactcatttttcgataggcacgccgtcaccccacaagagggccccgacggttcgtaggcgcatggtttcagagactgtttcactcccctcccggggtacttttcacctttccctcacggtactcgttcgctatcggtcagacaggaatatttaggcttatcccacggtcgggacagattcgcacgggattccacggggcccgtgctacttgggagacgcgatcgccagaccatgcgcgttcgggtacggggccctcaccctctgcggcccggtattcaacccggttcccctggcacatggttttatgcaactgacggccggcccgtcggagccggcaaacgcgatccctctacaccccgcgcgcaacccccgacgggtatcacacgcgcaaggtttggcctgatccgctttcgctcgccactactcacggaatatcctttcctgcaggtactgagatgtttcacttccctgcgtaccccccgcacacggcggtaccggcccatgacggccggtgggttcccccattcggaaatcctcggatcaaagccctgttggcggctccccgaggcatatcgcagcctcaaacgtccttcatcggtcctgtctgccaaggcatccaccatacgcccttgcaggcaacacgcaccacacggtgcgcatggccgcaaggatccttcctagcaaattcccagacgacaaatcatcacactaaaatgatcacaaaacgatcgaaacaaacactaaaaatagagttcgattcgaaatcaacagcaagaacaaagaatcaaaagaaacttcgtcttgctcgcgtccactatccagttctcaagccaccacgcaccaccacgccgtccggacgggaccagcccgccatcagacacgatgggcatcgaatcgcgccaggccaaagcctggggtggcgatccgggagcccaaaagcgcatccgcaccactcccgcggaacatcccacgacggacgaaccgaaagcccatgatctcttccacaccagcagccccaggccgccgcgactgccgcggcgtcggggttcgcaccgccggacgaacatccggccgtattctccgtagaaaggaggtgatccagccgcaccttccggtacggctaccttgttacgacttagtcccaatcacgagcctcaccttagacggctccctcccgcaaggggttaggccaccggcttcgggtgctgcccactttcatgacttgacgggcggtgtgtacaaggcccgggaacgcattcaccgcgacgttgctgattcgcgattactagcgactccgccttcacgcagtcgagttgcagactgcgatccgaactgagaccggttttcagggatccgctccagctcgcactgtcgcatcccgttgtaccggccattgtagcatgcgtgaagccctggacgtaaggggcatgatgatctgacgtcatccccaccttcctccgagttaaccccggcggtcccccgtgagttcccggcataatccgctggcaacacggggcgagggttgcgctcgttgcgggacttaacccaacatctcacgacacgagctgacgacgaccatgcaccacctgtgaacccgccccgaagggaaaccgtatctctacggtcgtcgggaacatgtcaagcccaggtaaggttcttcgcgttgcatcgaattaatccgcatgctccgccgcttgtgcgggcccccgtcaatttctttgagttttagccttgcggccgtactccccaggcgggatgcttaacgcgttagctccgacacggaacccgtggaacgggccccacatccagcatccaccgtttacggcgtggactaccagggtatctaatcctgttcgctccccacgctttcgctcctcagcgtcagtaacggcccagagacctgccttcgccattggtgttcttcccgatatctacacattccaccgttacaccgggaattccagtctcccctaccgcactcaagcccgcccgtacccggcgcggatccaccgttaagcgatggactttcacaccggacgcgacgaaccgcctacgagccctttacgcccaataattccggataacgcttgcaccctacgtattaccgcggctgctggcacgtagttagccggtgcttattcgaaaggtacactcaacacaaaaatgccttgctccctaacaaaagaggtttacaacccgaaggcctccatccctcacgcggcgtcgctgcatcaggcttgcgcccattgtgcaatattccccactgctgcctcccgtaggagtctgggccgtatctcagtcccaatgtggccggtcgccctctcaggccggctacccgtcgaagccatggtgggccgttaccccgccatcaagctgataggacgcgaccccatcccatgccgcaaaggctttcccaacacaccatgcggtgtgatggagcatccggcattaccacccgtttccaggagctattccggtgcatggggcaggtcggtcacgcattactcacccgttcgccactctcaccaggcagcaagctgcctggatcccgttcgacttgcatgtgttaagcacgccgccagcgttcatcctgagccagaatcgaaccctccacaaaaaaccttcatgaaaagcatccgaacagatgactcacaaaacaaaaatcgacgagcacgtccttaaggaaggacgccctcaaaaaacctcacccctcatcaaaccctcccgggtacccaaccaccacacaagcggccaggcgaggaatgaactggcaatcattgactataaagaagtagtacaaacacgctcttgagttctcaaaccaccaccacgtcagcaggcagccaaccaaccagaggaaggaagcccgccgcgctgagcggcaacaggtgaataacttacacgcaaaaccacaaccacgcaaatcgaggcgcgatgaatcctcaggaatcgttgcaatcacacggttccttcggcgtgtcgcacagagctcattttgctctgctgaggtcagaataacccttcaaatgtttccggaaaaacgtcgaattcattatgtggttggcgtgtcgcgaaatttttcagaccgttgacgcatgttcatcttccggcaaccggcgttcatacaccatcggcatatcgacatgacggctcatcatcgatcatcattcatgaatcgcgggtatacctataaacatgactaagaagattgctgtattaactggcgcgggtatctcaacttccgcgggtatcccggattttcgcggtccggatggcgtttggaccaagcaccccgatcagatgagcgtatacgacatcgacttgttcctgcgcaatcaggaggatcgcgaatactcctggcgctggcagaaggagtcgcccgtctggaacgcgcagcccggcgccgcacataaagcattggtcaagctggaaaaagccggcatgctcaccctgctggccacgcagaacttcgacgctttgcatgagaaggccggtaacagttcggatatcatcgtgaatctgcacggcacaatcggcacagcgcattgtatgaaatgccatcaggaatatgacactgcggatatcatggcccgcttggacgaagaaccggatccgcattgtcatcgcaaattgaagtatcgcggcgatatgccatgcaacggcattatcaaaaccgacgtggtgtattttggcgaagccctacctgagggcgctatggagaagtcttacagtctggcggccaaagccgacgaactgtgggtaatcggatcgaccctcgaggtgtacccggcagcgagcattgtgccagtggccgcgcaggcgggcgtgcctatcaccattatgaatatggggcacacgcaatacgatcatcttgcaagccgattgattcatgaggatattgccgtcgcattgccaaagctggtagatgagaccattgcggagaacaagtagctactgccgccaagccgactgaggagagttcaagcccgaagctcccctcagtcagcttcgccgacagctcccctcaaagaggggagccagattatcccgccttgtctcagtcggctccgccggcagtagcgaataattcatgattatgttcaaccacccaccggcgcttttgcgctacctcccatcagcgggaggtattggacatcagtagatgcgcttggggctaaagccggcttctcgcagagccgcaaggatgcggtcgatatggtcagggccgttggtttcaaccgtgacaccaagagataccgcattggtgtagtggccggaggccttgaactgatcgtgatccagctggatgacgttggcgcgctgctcggcgagcaatgtggccaccttgacgagctgtcccggagtatccggcaactcgacctcgaagttcatgatgcgaccgcgggcgatcatacccttttgaatcactgcacccatggtcacagtgtcgatgttgccgccggacataatcggaaccaccacgtgcgggccggtggcggcagcgaatttacgggagcgcaggttcaggtgctccagcgcagccagggaaacggcaccggcggcttcgaccaccagcttgtgcttctccagcatgagcagaatcatctcattgatatcacgctcggtaacggtcaccagatcgtccaggaactcgttgatcagggcgaacggcagatcgccagggtgcttgaccgcaacgccttctgcggaggtgaccacctgatcggcaggagacacatggcccgctgccagcgagtccttccatgccggggacccttccgggatcgcaccaatgacgcgaacttcgggcttgaacgtcttgatggccagagccacgccggcaccaagaccgccaccgccaagcggcaccaccacgtcagtgacattcggcacgtcttcgaggatctccagaccaatagtgccctggccgcagatgacctcataatcgtcgaatggcggcacataaatcatgccttccttttcggcgagctcggcagcgtgagcggcggattcgtcgaacacatcgccatacagcaccacgtcggcgccgtaggccttggtggcatcgaccttcagcggaggcgtgattgtcggcatgcaaatggtggccttggctccacgttcacgggccgcataagccacaccctgggcatggttgccggcagacgcggtgacgatgccgtgagagatctgctcttcagtgagcgaggcaatcttgttgtaggcaccgcgaatcttgaaggatccggtgacctgcaggttttccggcttcagaagaatctcatggccggtcatctcactcagcaccggagaaggaatgatctccgtgtggcgggcagtgcctttgagtcgttcggcggccaacttcaattctgctgcatgatcgcgctgcagcgccttcaaaacatccttttgttccatagcttttaattgtatggcgcggggacaccgaaaacagtggtttatctcgctaacgagcgctcatttacggtaattcccgttcgtaatcagctttcgaggggctgatttggcttcgcggggaggtctatctcctcttcgaggggctgcccgatcgtgcaatgcgtgagtatgacacatcatttgcaacggtattatgcggttttcggagcccggctattcaggcaccaaccccttgaaacggagatagacctccccgcgaagccaaatcagccccttgaaacggagataccgcttagcaacacttataggctgacgacgacgccctcccatggtgcaagctcacggccggcaagagcggtcacagcgtgcgcggcgtcatacgtgctgatcaccacgttcgactcggcaaggccatcggccactgccaacagttcggcggattcgcgaggcaaatcaacagttcgcccggacatattggccacgaccaacaacttctcgtcaccgagggtacgagtgaaggcatacacatgcgcatcgtccgcgtcgagcagctgccagtctccggctgccaccacaggcatgtcgtggcgcagagcgatgagcttcttatagaaggagtacaccgaatccggatcatcgaattcgccggcggcgttgatctcggcatgattcggattcacggaaatccatggctcggcggctgcgtccggtgcggtgaaaccggcgtagacggagccatcccactgcatcggtgtgcgtgagttgtcacggccgcgggcggcgataccggccatcatggattcgggcgactgcaccttggcttcttcgaccctctgacggtaggcgttcagggattcaaggtcgcggtactggtcgagacgagtgaagtgggcgtcggtcatgcccaattcttcaccctgatagatgtacggggtgccacggtgcaggtgcagcatcaggccaagggccttggccgagcggacccgagcctcttccgaggaatcgtcaccccagcgggaaaccacgcgcggctgatcgtggttgccggtgaataggctggcccatcctgcgttctgcacagcggtctgatagccggccatgatgctcttaagcttcggcagatcgagcggcaacggcttccacttggtaccttcgcaatcaaaatcaacatgctcaaataggaagagcatatccagctcgccattggccggatcggtgatgtattcgttgcgctgggctgtgacgcctggcgcctcgcctacagtcaggaagccgtcacgcccttcgaatacctcacggcgcatttcagccaggaattcatcctgacgggggccgtccgcgcagaacgggttcgggctggaatagccctcctcgcccaccggtagatcctcgagctccgagccgaactcgcccggcagcttaccgttcgaatcaatccgcttggagatgagggtgatgacgtccatgcggaagccatcgacgccgcggtcaagccaccagttcatcatgtcgtacaccgcgcgacgtacggccgggttctcccagttgaggtcgggctgcttcttcgagaactggtgcaggaagtattcgccacgctccgggcagtattcccaagcggagccaccgaaatacgacccccactgattaggctcggcgccgggctcaccgggtgtggtgcccggacgcgccgggcgccaccagtaccagtcggcatgttcgtcatccttgtttttggatgcctcaaaccattcgtgctcgtcggaggtgtgattgaccaccaggtccatcacgattttgagtccgcgcttatgggcttcggccagcagctcatccatatcatcaagcgtgccgaacaaggggtcgatgtcctgatagtcagaaatatcgtagccattgtcgtcttgcggggacttgtagaccggagagagccagagcacatccacgccgagatcggcaagataatcaagccgtgatgtgatgccctgaagatctccgaaaccatcgccgttcgtgtcttggaaggaacgtgggtaaatctgatagaccacggcgttggaccaccaggggttaggggtggcaccgttggttcggatggcatcggggattattgcacggttgaaagtagtcatcattggctcctctattgatatgttgtactgcggcgttgctcacagtctaaaaaacaacgaattacattcccattgggaaactgcattggtgtgccggaaaataaataacggttcgcgttcatgattgcacccggaatacacgcaattggccacatgcaacctcgcaagtatgggtctgtcctgaagctaaatcgatcgtcataccctgctcatcaatgatgcggcaaggatgctcgccggccgtaataatgccgatctgcggttgctggcgcaatccgacgaaagcgataacacgttccgtgccgaactttgctgcaacgccaagcgcctgatccgtacgttcggggtcatgcagcagcgattcgatgactggtcgagccggttcgtcagggcgaggtagtgtgccatcttcggaaagtaaatcgcgcaagacggatgcatccgtacggccacaggcatcggagcagtacacaggcccgccgctcagcaatcgcagaacggcatggacgcgtgcatggggatgctcagtccagaacatatcccaatcacagtggtacagctcccccatcagcaacgcacagtaggcattctgcataaggtgttcggccaaggattcgggactatgcggcaagtagtcatcgctgctgcgggtgatcggggaggaaggacgatgccaataatcctccgaggccatgcccatgcagttaatcagcgctccgccgaatcgccgcgaggccacctcgtcaagcgcctgatggcggccccacgtggcttcgccatagctttctgcaccgcgaaccattaccgatgtggaactctgcgaatccaccttgacgaaatcgacaccagcgcacgcaagttggctgtcccaggagtcccagaatcgtgttgcctgttcgacactgttgccgggaatcaggcaaccgttattcgtggcggttagtgcatttcggcaaccggccacggcttcgcctgattcggccagaccactccaataaccttggaacgcttgccatacgcccacgctgcgtacaccgtatttggttttcagcaatgcaatggtgtgggcaagtccgtgcggaaagcgctgacggtccgcgccaaagtcgataagggtttctttcgtgctctccacattggaccagccgtcatcgataagcacccaagaaataggaacatgcttggccttgaattcttccattttgtcgaagatggcctgttcgttgacgtctcgccccaacgaatcccaagtgcaccagccaagcccggtgagtgcgcttgggaatgggcgctctttacgagtaaggatgcccagatgcttggctgcagcttgcgtggcggcatgaatggccatatatgggtcaggaccacaggcgacatatgcagcggtatcgcacagagcagtgcggccaatacgattggaagacacagtaagccgcaatgacatgcagcctcgctccgcagcaggcagtcccccgaaatcggcccgatcttcggttccgcaaatggcgaccagcaccagccatgcggggttttgaacgtcgttgctacggcacagcaacaactgcgtgcgttccggcaattcggacggcgtgcatacccatgtggggcgcatccaccattccttgtgctgatataacgccagcatggtggcgtcatggctgctgccaaagccggacatggcgagccgcacgtcaatcgcaccatacggctcgaacgtctgttgttcctgaaaagcagcggcacggtcttcaggttgaggcgcatgtgcgtttacgtcaacgcgccacagctgcgtctggttgtcatcggacgattcgggaacaatcgcaaccgagtccgccggcatatcacaaatcaccgaagccggttcaccataggcagcacggccggtatcaagatgggccgttaccgtgcatacggttattggacaggcttcggcgatcattggcaagactccttgatattccctatgcgagattatgccggcagggcccagacggcggtggccggagggataacctctacgtgagtttcatccggaacaacagcgccggatgaaagcagcatggtcatcggctgcggcaaggcaaccgactggctgtcagagaagttcgcaatcgcaaccatgccggagggcaaacgccagccgagtagcggtgccgggcaatcctcatcaggcagccaatcgaactcgaaattggcgccattggccacccatactttgcgcagcgcaacggctttgcgatacagatacagtgcggaggccgcgtcaccggtctgcagattgacggcatactgcgcgaaccatgctggctggggaagccatgatgcgccagtggcattgaaaccgaatgacggtccatctgcctgccatggcagaggcacacgacacccgtcgcgacctttgaaataatggccggacctctcccaattcgggtcttgaatttcgtcaatagtcagatcgaaatcctcaggcaaaccgagctcttcaccttgatagacaaaggcggtgcccggcagaccgagcataaccaatgcggccgcgcgcgcacggctagcggcgagtaccgggtcaatcgacggattcgtgccgttggaggtcacccattgctcgatgttcgtgccactcggcaagccgagacgcgaggcaatgcgtggcacatcgtggttgccgagcacccaggtcggggcggtttcggcggccaacgcgtaacgatgtgtgcgttcgatggtggtgcgatattcctcgcgattccatgcggccttcgacatggaaaaatcgaataccgcaccaagctcgtcttgcttagcgtattggaaaatacgcgtggtgaatggcgaccatgattcaccgaccgcatacttggcaggtgtgtactggttgaacaggtcacgccattcccggtagatgccgtgcacggcgtcacgatcccagagcgggtcggaaccatcggtggcctgtggggacatcagcatcgggtcgatacggtcgcgcaatggctcgtgcaagtctttggccagaccatgggaaacgtcaatgcggaagccgtccacaccacggtcgcaccagaatttgagcacgcgcaggaattcctgccttacctcggggttgtcccagttgagatccggctgttccttggcaaacaggtgcaggtaataccagccatctccgcatggctcccatgccgatcctccgaaattgctgagccagttggttggcggcaattcgccgtgatcccccttgcctcggcggaatacgtagcgttgggccgcttctgattccggtcctgcagccaatgcctcctgaaaccaacgatgctggtcggaagtatggttcggcacgatgtctacgatgatgccgatgccgcgttcatgcgattgagccaccagctcatcgaactgcgcaagggtgccaagccgaggatccacatcgcaatagtcggcgacatcgtagccgccgtctgccagcggggagggatagaacggcgacagccaaagcgcatccacaccgagcgcttgcagataatcaaggcgatcgatcacaccttggaggtcaccgttaccatctccattggcgtcgctgaatgagcgggggtaaatctggtaaacgacggcgtcacgccaccagtcattgtcggtgaaagtcatatcgttcccttgtccgactgcttggtatgtacggattgaacagtatggccgcgcgaaacagccttccggcggccatacaacacatgctcttgccttggcgatcagcccttgaccgagccggcaagcatggcgcggatgaagtagcgctgaaggaagatgaacagaatcatcgtcggagccatgatgagcaaagcacctgcattgagcagcaccacatcggtctggtactggccgacgaacgactgcagagcacctgccatcgtgcgcttgttcgggtcgttctccaacaccacggccaacaggaactgattccatgtggccaggaaggtcagaatacccaacgaagagatggccggcagcgccaacggcagctgaatggagcggaaggtgcgcaaatggcctgcgccatcgatggacgcggcttcgatcaggtcacgcggcatctgctcgaagcaggaacgcatccacacgatgccgaaggggatgttcaggccgatcagcggcagaatcagggcgagacgggtattcagcaggcccatgtcgctgatttcgtagtacaacggagtgaccagggtctcgaacggaatggtcaggccgacgaggaatagcacatagatcaggcccttgcacggcaccttgagctgcgcgaaggcatagccgccgagcgagcagaagatcactacgcagggcacgaccacaatcaccagaatgcagctgttgagcagcagcggggtgatgttcgccatgttccacgcgtcaatgaagttctcccaatgcgggtgagaggtgaactgaatgccttcaggcatggagccctgcggctgcagggccgcggaaagcatactcaggaacggcagtacacagaagaggacggtcaaggcgagcatcgccgtgccggtgatgcgaacggctttggattgctgcatggtcacttctcctttccgttgaccagacgctgcagaggtccgacgaccagcagcacgagaatcatcagggtgacggcgagcgcggaagccaggccgacgctttgctgggtgaaggccaagcggtagacctgcacaccgggcaccatggtggaggtgccggggccgccttgggtggacatgtagaccacatcgaagctggcgagcgcggagatgatggtcatggtcaggcacacgccgatctgtcctcgcagaccaggcaacgtgatggagaagagctgacgccaccagccggcgccatcgaggctggccgcttcatacagggattggtcgatgccgccgacgccagaaagcaggagcaccacgcagaagccgagctgcagccagaagccgatcacgcccaccgcgttcagggaggtggactggtcgccgagccacacgtgagcgaaatcgccaagacccactgcgcgcagcaactggttggcggtacccttgtcggccagcatccaagtccaggccacaccggctgcggcgccggggataacgcgcggaaggaacaggcaaacctgcgcgaaggaacgaccggccttggacttcatatctttgataagtacggcgatgatcagaccgagcacaatcgggataatggagaagaagatgatcaagaagaaggagtgcagaatcgatccgtacagatcgggatcggtgaacacggtgatgtagttttcgatgccgataaaggtgctggcatcgatgccgttccattcgtagaacgagtaccagatggtctgaatgatcggccacagctcgaaggcgatgtagaacacaagtgccggagcgaggaagagcaggctgaccagaccgagggacatattgcgcttgggcttgaccgccttggctgccttatgggaatccatgattgtcaccacgctttgctggtttggtgtgaattggggattgatgatcgcgtgcagttggcatgcacgcgaggaaagagtgccggacggagcggaaaagggaagaacactccgtccggtaagggcaagaactacttgacttccttctcgtactgagcctggatggattcgacgaacttcttgggagtcatcgtgccgtcgatcagggactggaagccggggatgatggcgctggcctgcatacctgcggtggcgttgttgatgtagtcggtggtgttaccggtcttcaccagaccttcgtaggcggtaaggacctggccgagaagctggttatcggtgctcggagtctcgccttcgccgaccggcgggtagccgttgtcaactgcgatctggcgggcttcgtcggactggaggaagtcgaggaaggcggctgcagcgttcttgttcttggcgttggccgggataccgaaagcggtcacggcgttggctgcggcagaaccggaatcggccttttcgccggggaaggcgatccagccggcgtcatcgccaagtgcatcgttgatggaggcggagtaccagctgccggaggggaagaacagggcttcgccgttgcagaagcgactcagtgcagtggaaccgtcaagggcgagcgcgtcggaggagaagtaaccggcatcctgccagtccttgatcttctgtgcagccttcacggcaccgtcggtgttgaaggtggcgccatccttctggataatccaatcctgcacggtatcgcgaccctcatagttggtgagcaatgcctggtagatgtaggaagtgccgccttccttggccggcatcatcatggcgagcttgccagcgtcggaggccttcttcatatcggcctcgagctcttcgacagtggccggagcctcggtgatgccgagttccttggcgactttcttgttccagtacaggccggtcatcgagacaccgtccggcactgcgtagaggctgccggaaccgatcttaccgtcggagcccacgcggtagacctgagtctgggaatccggcagcttccaaccgtaagcatcggcgtaagcgtcaagattgacgacatggttgccacgcacagcggagttgatgtcggtgatacgggcaatgtccggggtgtcggcggcggagatgatgcgcggaccgttctgctgggaggtgttgtccggatcgtaggtggccttgatggtgacgttcgggtacttcttctggaaggcctcaatcagctgatcatcaaaggccttcaggccggcgccgtcccacagcttgagctcgtacttggtgtcgccgagatcggtgctcacggcttcggtcttggtgttggccttgttgctggacgagcccgggccgcaagcggcgacggataccaggcatgccacagacatcagaccggcaataacggttttggcggttcgttcgatcctcattgattattcctttcttccttccgggcgatcccggctatgtcttccttggctatctcggcttagcgtatttgctaagcgcttatgcatgaggataacagatgtcgaaccggttcgtcaaatccgcaacacgcaaacaaatggccgattcccgaaggaatgaggaaggcttgacgttccccataggcaagcacttccttctcgcgaaattgcgacatcggtcccttaaaatacctaagcgcttattcattcacctaggatgacgtttcgaaggctcgggcagctcgggaaaaattgaatgtggctcaatttgataccagtacgccacgctagacacatcatcctgacgctcaaatgcaccttcatatcctgaaccaatttgttgaagcgtgactctaagctcactatcaaacctgatgggatcaggaatatgccatcggtacaagccacgcataggtggacaataatcgtcatgatattggtttgctatagccccatcgcgcacagaataaaatggatatcctacatatggggcacaaaaagtacgctcgcgcgtatgaccatctcgctgctcagcgaagctccatgcaccgccaaaataatcttcggtaccggtactacacactgtgggataatcgttatcgccatctagaaaaaatttaatctctccctcaccccaccaatatcgttgcaacgtagaaatagcaagatatgtgccgacgtaatggccccgtccgctgactccatcgagaattacatagtcctcgcctaaagtagtgattggctgtctgcgccattgcgcatggaaataagccatttcacgggaggaatacgcattacccaatgcataatcaatctgataaaacaaagccggaatagcatgagcgtggtcattgcgcactacgatacgcgcccgtttacgaaacggcatcgtgaaataacaattcatgcctcgtgtaggcgccaccacaataggctctgagaatacatcgcaactttgtccaaagccgcaacagaagaagtctcctaggggacattccacagaaggtcgcttttcatcatcccaatagatggcaagcaccgcatcgcgcagaacgtatcgatcagcgtcactggtgcgatccgtaacggtaaaccacatgtgccgaatacaaccggggccttcaatatctgccaatgtcacagactgcccgggagcaatgtcattcaaacacggctttcccttgcgcgacggccccaacggaccagtttcacggcaaccaaaacccttggctcccgttgggttctccgcattaatcgaacatgttacttcgtcgcggacagtcggcaaatccgataaagttcccgcgtacggtcctgccatcatcataggttgactctcctcaaatcaagcgtcgctagcgaaagcggcatataagttgaagctgtttctaccgcttcgcttctttgtcatattgcgcctgcacattctttgtgaattcctgaggcgtgatgctgttatccagcagtaactggaagttagggattagcccacttgactgcattcccgcagtagcattattaatgaaatcgctagtatgaccgctcgtcagcacgtcggcataggcatcaaacatactctgctgcaatgcgctattcgccttgagatccaaagtagatgattttggcaaatagccagaattgtcaacaataatctgttgcgcttcggcactttgcgtataatcgaggaacgccgcagcagcatcacggttcttagcattcaccggaataccataaaatgcacctgcattagcagcaacgttcggctcatcttcactggtggcacccgggaaagcaaagaactgaacatcatcacccagcgctttggccacagtatccagattccaattaccgctcgggaaaaatagtccttcaccattgcagaacctgctcagagcagtagaggcatccactgcgttaacaccttcaggcatatatcccttgttattccaatcctgcaaggtggacgcagcgtcctgcgccgcctgattgtcgaaggtaccagatttctgcaaaatccaattctgcacatcttccgcagaactgttattagccattaacgcctgaaagacaaaagaggtaccgccatccttggcatatgtcatcatcggcagtatgccggcatccttggctgtctgcatatccgcctcaaactcctcgacagaggtaggagctgcatcaatacctagctgctcggcaagcttggtattgaaataaatgccagtcaccgaataggagttcggcaatgcgtacaaatcaccgctgccgagcttgccatttgaatccactcgatacaattcagtctgcgaatcgggaacatcccagccgtacgcatccacatatgcctctaaagacaccaaatggttgccacgaaccgctgaattcatgtcggtgacgcgggcgatatccggcgcatcttttgctgaaatcacacgcgggccattttgtccagagacattatccggatcatattgtcctttgatggtgatgtttgggtatttcgcttcgaacccggcaatcagcgcctcatctacagtcttcagacccgctccatcccacaaagtcagctcatattttttattacctaaatcagtgctgacatcagtaggatttgtatcacttcgtgagctacttgccgagccaggaccacatgcagtcaggcttccagcgataaatatcgcagcaagcaccgcgccgctgttacgcataatcctattcatcggttacctccttataccctcatcatatgcaatcgatatttctctttattgtcaccattttttcggcagcaataaaatacatttgcgatatcgattacgcacatcgtacatctttttgcggaacccgtcaatcttgcaccacaccaatggcgactttaacttcaaaatccagatacaatacaatcgattacgcaatgtaggagatcccatgagcgaaccaacaatctatgaagtagccaaggaggctggagtctctgcggcgaccgtatctcgtgcaatcaacggacgtgaccgcatatcggaaactactaggcaaaaggtatttgatgcatgtgcaaagttggggttttcagcatcaaaaacagcctccatgctgcgaacgggaaagacaaatcgtatagcacttaccgtaggtaactcactggctggctggttcagttcacaactagccgaaggcgtatattccgtgctcgcatcccaaggatatgacttgctatcataccgacttgcaaacgccgatcaaagacgcgatttcttttcctcaatgccagtgaagcgcaacgcagacgcggtcatcatctcctccttcgacatcagcgagacagagaggcgaaccttagaacaactcggtatgccagtcatcggtgtcaacaccatcgggcttacggaacagcaagatatgatttccatcggcgtagacgaaattaaagcaatgcgacaaaccgttcatcagctcgcaggactgggacatcgcaatatcgcctttatctgcaagcagcaagccagtaacggattcatatgggaagctgaccaacgtatagaagggttccgtcttggcatggcggctgagggactcaacttgcccgacggatacatcatcgcagtacaggacaacgaatttgccggagcagaggcactcagtagcctgctcgcactctcccctcgcccaaccgccgtatgctgcatcagcgacgagaatgccattcctctaatccatgcgcttcactcatacggattccgcgtacctgaggacatatctgtcatcggattcgatgactggccaatggcacaagcgctcaatatatcaaccgttcggcacgaccctcggtcctacggagcattagcggcagatgccgcaatccgattatcacgaggcgaaattctgacagaaagttgcatcgttgttcccacgacgctcatgttgcgcggcaccacaggcccagcacctcgagattaaacatcgacaacgtccgcattgatgatgcacatatcattattgcaatagcgaaacaacagataccagccagagaaaggacgaccgggtaacagccacaaggcggccacccattcaccatgaaacgcgcgaccatcaacgacgtagctctcacggccggagtctcaacttttaccgcatcccgcgctttgcgaggtaaggatcacgtagcagcagctacgcgggataaggtgctgaaagtggccaaagagctgaattacaccgcgtctcgctcggcggcggcgctggcaagcggacgcaccaatcgcattgccatgctggctcgcgaacggctggccggctggttcatgggcgaattattcgacgggctgtatgacgaactgagccgcgcacgctatgacttgaccgtataccgagccggcagcgtcgaggagcgtgcggaattctttacacggttaccggccaatcgcaatgccgacgccctcatcgtatccggattttccgccaccgatgaggaagccgacacgttggccagcatgggtatgcccatcgtctcggtgaactcgccgtatatcagctgctgccaagcctccgtggccattgatgacgaggcagccgaagccatggcagtgcgttatcttgcggccctcgggcatcgtcgtttctgctatgtggggcgcaccgatccgctgaccggcaaggaatggggattcgatgcacgcgcacgcggatacaaagatgagatagtctcacttggcctcaccgactgcggcatccacttcatcgactcggaatcaccgcgctcggccaaacaggtcatcgccaccatgctcgcgcagcctgagcggccgaccgctatctgcgtgtggtctgactactacgcattgcgcgtggtacatgagttgcaggcagtcggagtacgaatccccgaagacgtttcggtctttggctttgatgggtccgacgtggcggaatccattggattaagcaccatggtgccaactcccccgcgcgaaatcggacagattgccgcgcgcaaggcactggatttggttgaggggaagaccttggacgatcctcatacaaccgtgcctgtggtggtcgagcccggcgcgaccagtgggccagagcgggaataggcgatatggaaaagcctccctcggcggaaaccgaaggaggcttgggtggagccgcactacttcacagcgcccctcatcactccgcccacgacccacttttgggcgaaaatgtagacgatgaggatcggggccatggccatcaggtagctggagaatgccatcgggtagttggtggcgaactgcgagctgaagacgtactgggcgagcgggatggtctggttcgactggtcggtcagaatgatcaatggcaggaggaagtcgttccaggcccacagtgcggtcagaatggcgatggtggcgttaatcgggctcatcagcgggaagatgatggtccagaaaatgcgccacgtggatgcgccatcgatgcgggccgcctcttccagcgagaccggaatcgaacggatgaagcccgtggcgatgaacaggttcgtgcccaagccgagcaccgtgtacaggatgatcaagccgacctggttgtccagatgcagggagcccatctgcttcgcaatcggcagcatgacgaccgggaacggcacgaacatggcggcgatgaagaagtagtacaggaagcggaaaaagcgcttatccatgttgcgggccacggcgtaggccacgaaggtgttggtcagcagggtgagcaccacggcggccaccgtgataatcgcggagttgagcgcggccttcgggtagttgaccttggcggaggcgtcggcgaagttatgccactgccacgaggtgggcagagcgaaggtgccggcttcggccggggtcttcagcgcggtgacgatggtgaagtagagcgggatcagaatggtcaggctcagcactgccacagcggcggtcagccaccagttgatgcggtgatccctgcggaacttggcgggcttaccagctttggacggagcaactgttgcagtagtcatttcttatcctcccctaaatcagatttgttcctggctgcgggaaatgcgcagctgcacgaaggcgataatcgccagcacgatgaagaagagcacggcgttcgcggtctggtaggcgtactcgccaccggtcaggccacccttccaaatgaggtaggtgacggtttcggtggcggagttcgggccgccatcggtcaaggcgacgacctgatcgaaggtaccgagcgcgttcttcatggacagcacgaggttgatggtgaagaacggtccgatcagcgggaaggtgatcttccagaacttctgccagggattgacgccgtcgatggcggcggcctcgtagatttcgtcgtcgatggtctgcagaccagcgaggtagatgagcaccgagtaggcgatgccctgccagacggcgaggaaaacgatcgggatccagctgagctgctcattggtcagcagcgaggtggacagccacttgatgccgagtgccttgccaagttcgggcaacgggttcatgaagatgtacttgaacacgtagccgatgaccagcacggagagggtgtagggaatgaagaagatggcacggaagccgtttttgaaggcgatcttcgagttcagcatcaccgataggaacagggcgatcacattgatcagcactgtgatgagaatggcgatgaagaatgtgaacaggtaggcgtggcccacacggttgtcttgaaagagagcgatgtagttcttcaggccgatgaacttgtagtcgccgtatccctgcgaattggtgaaggaatactttacgccgtcaagaaatggcaggtagaggaagaaagcgaagatgatggccgccggaaccgccatccaataataggcggggtccactttgcgggtggagaaggcggaaaccttcttcttggcgggtttcttggcagcggacttagcggccggagcagcggtcttagttgcagttgcgtgtgacatgatgttctcctctcctaccgatcactcgaaggtcctggcttggaccttgtcccattcggtctgcatctggttcaggaagcggtcggtgttgccggaggtcaccatggtctgcaggtagccgccgatattgatggacgaaggaatgtagtgatcgcagaagtcggccactcggttttcctcgaagaacgggcgcactgtttccagcgcctcattgccgaagtaggtgtccttgagcggggtgatggcggactgcgcatcggcgtaggcgtcgagctgatccttctgcatgaggaattcgacgagtttcatcgattcttcggggtacttggtgtttgcgccgatggtcagcatcacatcatcgcctgcggtgaggatctgttcgctggcgtcatcggtggccggcatctgggcgaaaccaagttcaatgtccgggttgatgagcaggatctgtggaatggcgtaggtaccgagcggaatgattgcggccttgccttgggcgaagttctgcgtgccctgctggtaggtgacgccagtatcggcagtggagtaggtgaagagttcggattccttctcgactgcggttttccacagttcctggaatgtggtcttgccttgcttgagctcagtgtacttcgactcgggaaccagcgtaccggtcagcgaggcgagcggggcctgggtggtccaggcgtcggccactgtgccctgcaacggattgatgccggcgtccttgaaggtgttgagcatgtcggtgaactcggcccacgtggtcggcgggttctccgggtcgagacctaccttgcggaacagcgccttgttgtagatgtaaccggaggcgttgccggcaaagggcagaccatacaggcgcttcttggaggaatcggtggtctgcaccaagtttttggcgatctgcaccatgccggggttgagggtgtccacgatgggctcgtcggtgaagtcgtagaaaacaccggatgcggcgaagttgccgaagctgatgtcgccgttgaaggtgattacgtccggcacgcggttcttgacgaagcgggtgcgtagatcggtctgggcgttggcggagttgttgatgttgaccttgatggtcgggttctgcttttcgaagtcggcgaccatggatttgaactggtctgcagcctcggacttgaactggaaaaaatccagcgtaacggtacctgcggtgctcgatccgcagcctgccaggccgaagccgacggcgatagcgcacgccacagcagcagtgcgcacggccagacgcttcagtctaggcgttgaatgtggggaatcggacagcatattgttgactcctttatctttttccttccggcttcagcgccggcggctcttccactttcaaaagtaacgatcgcgccatttcattcccagcgccagcgagcccacttgcgcaagaaacaaaaagcgcggtattttgtgattaacgcaataaataatgcaaaggggcttaagcatgtctgacgccaatgcgattccgcaatggttttccggatccgagcatacgcatcgcgtggcggcagccatcgcccaatatgggccgattgcgcgcaccacattggcacagatgctgggattgagccagggtgcgctctcccgcattaccagcgatttgatttatgctggagtcatcgaagaactgccggctgtggccggaactacaggcaagctgcctgaacggtttactcccaaggagagctcggatcgtcgcggccggccgcagaccgcattggtattatgctcgaacgcacgcaccttcgtaggcgtcaaagtgcacggcacatccattgtgtcggccgccgtgaacgcgcatggcgaggtggtttccggccggcatgagataccaattggtgctgatcagtcggcagaatatgtgacatcgtcgatagccacgctggttcgtgaatgctctgatgatgtcgccgccaccggcctgcccgctcccactgccgtgggcgtagcggtcggaggtcacgtgatcgatgattccatcgtcacgttcgccccattcctgcactgggagggcaccacagatttaggcgcaatggtgtacgaggccaccggattgccatgcggcgtattcaacgatatcgattcgctgctggtggatgcctcctggttcgggccgggagtgggcgtggatacgttcgccgtagtgaccatcggcgtgggcgtgggctattcgctggctgtgcatggcgaaccggtcagttacccggacaagagttttggcctagtggggcatgtgctcatcgacccggagggcccgcgctgccccagtgggcatatcgggtgttcgcaatgcctgactgacgattcgattgcggaacagtattcggcgatcatcggccgcgcagtgaccttcgatgattttgcgcacgatgccagagcccatgtgccgcaagcctcccagctagtgcaccgcacttgcttccgattgggatcgctggtggccaccgtggcgaacatcgctatgccggggcatgtaatgatcgccggcgaatcggcatttttggcgaagcttggtaccgattcgctgcgtgacggcatccgcttctatcggcatagccaaactcaaccggtgaagttcacgattatggatcacgactggcagctctgggccaaagccgctgccagccgtgtaatcgtaaagcatattgggtaggtcactccgccacgaccagcaattacggacttgcctatcggcaaggctcaatcccaccttcactcagctatcgcttcgctcaggccatggctactgacagcccactgggctgtcagcttaacgccacggccttgaacagtactgcctgctgagggtggagggacgggggacggatgccgtagcgctgcagggcttcgccggtcaggactacaccttcttcgttccaccaaccgagggtgctttgaccattggtcagaccttcgaggtccaggcttgggtcgagcgggctaatgtgatacttgcgcttggggtcaaggccaggcagatgcacgggagcggcaggataggtctggctcgtggtcagctgggtgaagcggtagatggcagcattgcggttcggcatcaccatgccatcgaggcgcacggctggatcgctggagtcggcgtgcacgcaggtatcgatggcgaaccaatcacgatgcttcttgaactcggccacccacactgccagcttggcaagtgcatcgtccggctccttgagcaggttccattcgatgcccatgtgcccgaagaatgccatcgccatgcgcaattcctgactggtctcacgacgagtggagtgcgcggggctggcacccacatgctcgcccatcatggcaggcggcacaagcagtgatgtgtaacgctggatgtccgcgcgttcgaccggatccacgcaatcggacacccagatacggtcggcgtattcgaggataccgagatccacacggccgccaccggaagagcagctttcgatttcgagacccgggtgagcggtcttgaggcccttgaaaatctcatagacggcaatagtttgcgcatgcacggccggacggccggagcggcgagaaccgggctcagtgaccagcttgttgtgatcccatttgatgtagtcgatgccgagctcgccgacgagctgatccatgcagctgtaaatgtaatcgaaagcttccggattggtcaggtcgagcacttgctgagtgcggccctgcagcggcagacggccggcagtgggcgaaagaatccaatcagggtggttgcgggccacgtcggaatcggggttgaccatttccggctcgaaccacaggccgaactccatgtccttggcatgcacataatcggcgagcgccttgagggacttcgggccatcgggccatacgtcctgagaaatctgccagtcgccaaggccggaggtgtcgtcgcggcgagaaccgaaccaaccgtcatccaccacgaatcgttccacgccagaagcggctgccttgtcggcgagcgccttgagcgtatcgaagttgtggtcgaagtacacggcttcccacgtgttgaggattaccggacggccgtgcgagaacaagcgcgggtgtaaagaacgcacataggagtggaagcgtgcggcaatctcgttcagaccatcgccgaaggagccgaacagccatggggtttcgtaagagctctggccttcgccggctgcatcatcaagcgttacttcgccgccaaacagcagctcgccaccgccaatcacaccctgcgtgtacggcagtcgctcggcggacagcacggagttgccgctccagcccacgtgcaccgagtaggcctcgccatgctcgaagccgaagccgggaacgccggcggtaagcagcagagaagcatcgaaatcagggcgacctgcgagctgcggcttctcaaaacgtccgatggtgagcggctgacgctgcgggctgcgttcgcgaagatggtggccggtggtggtcaggatttcggatgcggattcgggcagggggaagccgagctcgatcttgccgatttccagcggggcctcggcaccggcttctgctccgaacaggttggtcacgatggccttctgacgggccaaaccaccgggcagaagttcgagatgccattcgagttccacgccttgctcttcgtcgcgcgcagtgattgccacgccgggcacattggccgggccagtggtacgggcacgtccagtcacatcggtgtagctgtcgccggacacagcatcgaggctagcagctaccacgccgtcgaatttcataccggtcacggtgaacttggggaagagttcgatgccgtcgcggcgcagcaccacacgctgctcaccaatccagctttcggcctgagtcggcaggatggacggccaggcggtgtcatcgagtgcaccggaaacgcgctgcggcttgagcgcatcgtacgcagcgagcaaggtctcaggattgctcagcgggcgaccccaatgaatgatacgcggcaggtcatcgccggcagcgaccagaccgattgccacgttggcatcgggctgtacaagatagatggcggtgagcgcggttccgtcagcggcggtaccggtgaaggtggcggggttctgggacatagtgtctccttcgacgtatacggaatgcattgaactactgattgtgatggtagaagaagtagaatatgttgccttggtgccgcgtgttggatggatgaagtaagtatttgagcgatttaccgccgatgagcgaagaacgtgctgaggagagtctggcaatcggcttctgccacgccgccatgtacttcaggggcgtgaccaatatggggatcgcgcgggatatcccagattgacccgcaagcaccgagcttggagtcccacgcgccaaacacgatggtgccgatatgggtttggacgcatgcgccggcgcacatcgggcaaggctcaagcgtaacagccagtgtgcaatcggagagattccacgagcctaatgcgcgggcggcctcacgcatggcaatgatttcggcatgcgccagtggatcgccatcggcctcgcgtgtgttgtatcctcgcccgatgatttggccgtcggcgtccaccaccactgcgccaaccggcacatcgccggctgccgcggcccttttggcgagctccagcgagccgtgcatcatctcgtcatatcccatatgccccatatgaacgagtgtatgccgcgtggcttgcggtcatcaacgactttcagcagatatgtcccatctggacgagtacacgacctgccccgtgggacaagatgtgaatttggccggttttcgcattatgtcccacgctcctctcaatcggcgaaaagcatcatccttaaaaaatggcgacattccaacgtttcatgttttgggcttgtgggacataaagaatgtcaatcgattgatgttgctaatgggacacggtcaagtgggacaacacgaaaaaatcgccagtttccgcatcgtgtcccacgcaaaacgacatgatccaaccgcatgccacacgcgagatgatacgaactcagccacactcggcctgaagcttaatgtgttcctaacgatgctcatatactttgagtgataaaagaaagggagacactcatggctgtattcgagctcatcctgtgcattatcgcagcagtggtggtgagttcgttcgccagtcgtttcgtgccgcgagtgtccacaccactggtgcagatcgtgctgggcgtgctggtcacctacttgccgttcttcccggatgccaagctcgatccggaattgttcatggtgctgttcatcgcgcccttgctgtatctcgaagcgcatgaaatcgacaaatccgccctgctgaaaacgttggatttgagcctatccctggcgattggtctggctatcgtgacgatgaccgcagtgggattcacgctgcatgccgtatggccttcgattaccttggcttccgctctggccctaggcgcggcgctcggcccgaccgatgcagtggccgtgagttccttaggcaaagaggcttcactgtcccaacgtcagcgcagcgtactcaaaggcgaatccctattcaatgacgcttccggcatcgtcggcttccagtttgcacttgctgcagcattcaccggagactttgccgtgggccaagccgccggtgaattcgtgatctcgttctttggcggcacgctgttcggtctgctggtggccggatgcgccaactgggtgttcgagaccgtacgctccctcggttgggagaccaccaccacccgtattttgatggaactcttcctgccattcctgctgtatctaggtgcggaggaatgcaatgtatccggcattctggcagtggtggcagccggtctgttcatccgtttcgaccgtaccggagtgggaccgaacgtggcccgcacgaatatcgtgtcttcctccgtgtggggagtgttgagcttttccctcaacggcgccgtgttcatcctgctaggcatgcagctgccgcgagccatgcaggccagctggtccgacccatacatcagcaacactgtgctcatcggcattattctgctcgtcactttggtggtgattgtgctgcgcttcctctggatcaccgccatgctgcgcatcgcccgcgacatgaacaccggcatgcgacgcaaaatgacccctgagcgctggaggtcggccgccgtgatgacgttcggcggacccaagggcaccatcacgctgtcgttgatgtttactatcccgtattacattgcgggcggcgcggcattccccatgcgcgacgaactcattttcatcgcctccggcgtgattatcgtgacattgctgctagccaacttcctgctaccgttgctagctccgaaccgcaaccgcgatcctggcgcggagatgataccggtcaccattgaggtgctccgctccaccgtggaagaactgactggccgtatcacgcctgagaaccgacgtgcagtgcttatggtcatcgaccagtacactaagcgcattggccgcttgcagcagcacatcggggaaaccgacccgcaggggttggagaagctgcaaatcgaagcgctgcactgggagaaggaattcgtgcgcgaccgccttaccgaaaccaaggcgcatccggcggcggattcagccacgcaggagctgaatgtggaagcttgcgagcgcatgcttgaccagatcatgaatacgttgcgccacacctccaccgatccgacttccggtcatgcggtatcgcagattcgcggccgcgcgcgcatgttgcagcgccaagtgagcaactacgccaagcgcaccgtctcgaagattcgccataccacgccgctggtgagcgaggatcagatttttgcccgcacacgcgaattgcaggttgaagcgattcatcatgtgattgaccggctggtggacgagatgggcaacgacacctacaacaccgagcattgttcagcgctgcttttggattaccgtcgcgctgagggctcgctgcaggcacggccaaatatgagcggcaccactgaggcaatcacgcaggtcgaagaggtgaagcgcgagagctacggtattgagctcagcgtgattcaggacatgcttgaggccggcgacatcaaccgtgcacaagcacgttcgctcaggcgcaatatatacgtcatgcaggttgacgccgattccggcatctaaatttcttggctctcccctctctgaggggagagccaaggatgctactttctcgtgattttgagggctacccagacactgcggatgaggagcactgttaggtatgtggcgaacaggatttcgccagtgcgtggggtcatcgcctcggcaatccacgtgcccagtggcgcagtcaatgcggctacgatgccgataatcaatccgaccttggcatgcaccatgcgccggcgaacattggccaccgtagtggtgacggcgttcgggaacatggccaacaatgaagtgccgcgagcaatcagatccgaagcatcaaacagaatcgataacgatggcacaagaatggcaccaccgcccacaccaagcaggccggccagaatgccggcgattacgccgaataccaccatcaacaggccggtaacgaggttcaactcaatcgaggaatcacgcgaaggcacgaatatgagctggctgagaatgacgaatgccatgaacaccacgaatgcccaacgcagcacgacttccgacaatcgggacagtagtagtgagccaatctggccgccgacaaacataccgatgaacaccagcaacgcggcaatccaatcgacattgccgttgaccgcgtaagacagcacgccagatactgacgtagggataatcgccagcattgaagtggcggccgcatgacgctgggtcaggccaagccataccagtgcaggtacgatgatggtaccgccgccgatgccgaacagtccagacaacaaaccaacaagcacgcccactactaccatcaccgcaatgccgcgcggggattcgtccacatggttttcttcagcactcacttcgctcatgggactttagtctatgaccggagtgtgtgcgggtctccgttgcgtccgattactgtacatggtgcggccgcatcgcttcatcaccacccagtgccatgaatcaggcaagtattacagcacgccagacgtgatgtcgttatccagcaaccactggcgcagatcggcgaattcctcaagactcacattatggtcgaggccgcgatagctcttggttttgagccacgtatgctcctcaagccaggcagcagtggcgaataattcgtacttgggaatcacgccatcgtttttgccgtaggtgtagaacacggggatatcgtaattggccaagcgatcgtcggcgggagcggtgccgggtacttgaccgggcgcgttgaaaccagacaacgatacgacagcacgatagcgttcgggattgatgcgcagtagatgcacggcgacgagaccaccttgcgagaagccgagcggtactacatcacggtcagcgggaatgttggcagccacccaccgatcgacggcagtggcggctgcatacgcgtcataatcaagatcatcgccgaccggcagagcgtcatggagccacgcgtagttgccgggcatttcactgcgttcgggagccttggcaagtgccagtgggccgcgcaacgctacaaaatcgttgtagggggcgatgaggcgcatgatgcccgccatgtcttcttcgctggagccccagccatgcaagcataggaataacggatgagtggggtgctggtcgaagccgccgcgcgaggtcacgctgtattccactgaaagcggctcgccaaaacgcccaggcacggcagtggattcacggccgattaagggccgacttgcattcgcttcgttgctcataccaccacaatatacggcgttcggctgttgtgaagtgctcaactggcatgatttcggtcacactgcggcattgccactgtccgtgccatctttggctgcggcgatggtttcgagggtgccaccccactgctgctgaagcgcggtcatattgtcggcctcgccgaacaccatccagcgcttgccattcagcaaacgccagtcgccttgcgtcttctcgttgtcggcatgctggcccaacaattcagtgatttcgcttttgattggcgcccggctcatcgcagccgaggcctcggagtcaaaggatacgaacgcaacacgcggatcagcacacatctgcacggtggtgatgccaggcagaccgcccgcatccaatccttgccacccatccttgcacgcgccgccaaccgcccgttcaataccttgctccatttgtgcggtattgtctaccggcgctttgtcattgacggcgggatgaatcaaaccctgtgggaacagtacgcccacggccacacccaccaccaaacaagccgtggccagaaccaatgtgacgatgccgcctgcgcccactcccccatgcgtggagtgacgcggcatcgtgacacgcgacgaaatcaccagaatcagggtaagtccgatcagcacagccgcagtgcccgcgatataccgacctcgcacattcaccaaaaagccgatggattcgggcgcaatctcatgggccgccgataagacagccaccactacggccagcaatccggtaattaatgcgatacgccgcaacaacttggatgcagggctatcgactttcagcttgatcgcacgccgaccagagccacacccccgagaatactgctgttcgcggcgagcgcggcgcgaaccgttgtactgcccgtcgtcaaagaaatcgtaatcctcgttattacttgccatctggaccgccctccctgccgatagccccagtgtaccgccccaccgtgtgagtggtcgtcattccgcaggatgaatcgactaagcaaaaaagaaccccggcggagttgccgccggggagagaaaggagagagaagaagaaaggggttcaattgtcgggagctgctgcggctcctgatcagctcttcgctgacattttttatataaccactcgattctgtgtctatctctgaggttctctgagaataacctgaaaattttgcgcttgggcgctgccggctactgtatcggctctaatactgtttccgcacggggcgctagacttaggaacagtatttgttctgccgcaaggagttttcatgctgctgtccgaccgcgatattctcgccgctcagtccgctggtcacatctctctggatccgtggacaccggagatggtgcagcccgcctccatcgacgtacggctggatcgctatttccgcctgttcaacaatcacgcatatacctatgtggatcccgccgaaaatcagggagcgctcaccgaacagtttgaagtggcccctgacgaaccgtggattctgcaccccggtgagtttgcactgggctccacgtgggagtacgtcaagctcaatccgactattgccgcacgccttgagggcaagagctcactgggccgtttgggtattctgacccactcgaccgccggctttattgatcctggcttcgaggggcatattacgcttgagctgtccaatgtatcgacgttgccggtcaagttgtggcccggcatgaagattggccagatgtgcttcttccagctgagctcgccggccgagcacccgtacggctcgcaaggcaccggctcccattatcagggccagcgtggacctaccccaagccgctcctacgagaatttctactgcgctcacattactgactgagcactgcaattcgttatttcggccggtacctgccggccattcgcatatcgcttcaaggagatgttatgaccaacagtgatggcggtttccaattcgacttccagcaccctgaagaaccatccaagccagtagtgcctccggttcccccagcacctgcgactcaggcaacacagcctgcgcagcccacacaacccgtatggccagccgcgcagccgacgcaggcattccaaccagtacagccgacacaagcaacccaagcattccagtcagcacagccgacacaagcaacgcagtcattccaacctgtgcaaccgacccagccgacgcaggctgtaccttcatatgacgcgactgcggcaactcaagcattccagccgattcagtttggacagcccacaaccccggcatacggtaccggcgccacttctgggcagaccgtcgccatgccggcagccccagcccaggcgatgcctgctgaagatatgcaggcgactcaggtatttcagctgtccgaagtaccggctgcggctcccgcacagccggcgacactaccgcccaccattccaccactcgatcagttcgctgatgaagaagagcccgaagaacacgagcctcgtcatcaaggcggcggcaagaaaaacacgggcaaaaccgtcggcattgtcatcgccgtggttgtggtcgtggcgttgattgccggaggcttgttctggtggcattccaacagcagcaaggtgagccaagcggcggcgctagtcgaatgcaaggcagcagccaagcagtatgattcggccaagaagaagctcaccaccgccatcacgaacggtcagaccagcgcgcagacgcccaccagtgacgtggccgacgtcaacaccatcaccacgttgaatcaagcggtgcaggatgctggcaccccggtcgataccgctacctgcgattccaagctcagcgcagatgagttgaagaagcagaccgaagacatgcagagcaaggtcagcgacgccgccgataagacggatgccatcaacagcgccatcaaggccgtcaatgcttccaagaagacggcaaacaccaactcgctgaagtcgaacctcagctcggccgtttcgcaggctcagggcattctggacaactcggccggcaacgtggccgatgagaatactcgcaccgcattgcagaccgccattaccgaggcgaacaccgtggcaagcagctccaacccgtccgaggccgacgtgaataacgccatttccaagctgcagaaggccgaggccgacgtgaacgcttcaatgcaggccaagcaaaaggctgacgccgatgcggcagcacaagctgaggctgagaagaaggctcaggaagaggctgcggcggctaaggctcagaagaaggccgaagaagaagccgacagctcaagcgggatgaatagcgacactggtagcaactagtagttctgcgttccgcatataaagggcggggcaaatcctacgacaggatttgacccgcccttattgttatttggtgctatccgttggcgttactgtcgcttagccatcgcgcgcagcacaatcttgcgcaactcggaggcgatgagcacaatcgcagccaggccgatgcattccacccaagccatcgggctgagcgcaacggtaccgaacgggccgttaaggaacggcacatagaccaccacaagttgcagcgccacggacaggccgatcgcgccccacagccacttgttggagaacaagcccacgaacacggactgcaggtgggagcgggaggcgagcgcgttgaacagctgggcgaacaccagaatcgtgaagcccatggtacgagcctcggtcatctgtgcctcatggccgatggcatccaccgagcggtcggtgaacaggccgccggacaagtgcatatccatgccgatcagtgtgacgatggccatgatgacaccgatgtagatgatgtcgccccacatggaggcgtcgatcacacgatcggtcatcttacgcggcttacgacccatcacatcgtcggtttgcggatccacgcccatggcgagtgcgggggccgcatcggtcagtaggttgatccacagcagctgcgtggcgaggagcggtacggcgacgcccacggattccggctgacggatgccgaggaagccggccagcaccacgccgaggaacacggtgaatacctcgcccacgttggagctcagcaggtagcgcaggaacttgcggatgttgtcgaagatcacgcggccttcgcgcacagcagccacgatggtggagaagttgtcgtccgccagaatcatcttggcgctctgcttggtcacttcggtgccggtgatgcccatggccacaccgatatccgcggacttgacggccggagcgtcgttcacaccgtcaccggtcatggccacgatgttgccctggcgctgtagggactcgacgatcttgagcttgtgctcaggagccacgcgggcatacacggacacttcagcagtggccttgtcgagcacggcttcgtcgggcagctgatcaagctggtcaccggtcagggccttgccgtccttggcgatgatgccaaggtcggaggcgatgcgggcagcagtcagcgggtggtcgccggtgatcatcacggtgcggatgccggcacggtgcgcctcggccacggaatcgcggacctcagtgcgcggcgggtcgatgatgccgaccatgccgttccagataaggtcggtttcgatggcctcggactgttcggcgatgtcggccacctggcccgcggcatttacgctgacgcccggtacatcggccagcgagctggtttccagcggtcgacaggcctgaccaagcgtgcggtatgcctcggaagagaggcgttcgacggtggctagaatcgactggcgatcaccttcggtgagcttgcggacctggccgcccacgcgaatgcgcgagcagtagctcagcaacacgtccggcgcacccttggcgaacacggtcagtttgccggaatcggtgtcgtctttagcgatgatggacatgcgcttgcgttcggaggtgaacggaatctcgcccacgcgagtgtaacggctgaccttgtgatcagccttgaccttgcgagcggcaacgaccagtgagacttcagtggggtcgcccacaatctcccacttgccgttttcctgacggagttcaccgtcgttggccagtgtgccggccacgagtgtggcaataacctcatcggcgatggtcttggcttgatcggattcgggatcaacaccaccggccatgaccatgcggccttcgggcgcgtagccagtgccggtgatctgcacctcgccggatggggtgaccacacgttccacggtcatctcgttacgggtcagggtaccggtcttgtccgagcagatcacggaggcggagcccaaggtttcgacggaatgcagcttcttgacgatggcgttgtgggcggccatgcgctgcacgccaagggccagtaccacggtaaggatggcggccaggccttccggtacggcggccacagccagcgaaacggcgagcagcagggaatcaatcacgtcgtggacgtcgttgaagccctcgagcacggcgagcgctaccaataccacgacggcgatgatgcacaccgcaatacccagaatcttggagacataatccatctccttctgcagcggagttttctcgtcttcggtggcggaaagcatgtcggcaatcttaccgacctgtgtgttcatgccggtgccggtcacgatggcacggcctgtgccctgcgtgacggatgtgccgttgaagatcatattggcgcggtcgccaagggccttcgcttcggtgagcgtatccggcttcttaccgactggcacggattcgccggtcagggaggcttcggcaatgcgcaggctggccgcgttgaccagtcgtccatcggcagagaccgagtcgccttcggcaaggacgatgatgtcgccgggaaccacgtcggcggtgttgatgcgcagcaccttgccgccacgcagcaccgaggtctgcggagctgtcatttgggcgagcgcctcaacggcggcttctgccttggcttcctgcatatagccgagcacggcgttgacaatcaggatgaggatgattacgagggcgtcgaacggcaacgcttcgccgccttctgcgccgggacgcgcattggctttctcgatgccccatgcaatgactgaaataatggtggctgcaatcagcaggtacaccagcggatcctggaactgggccaggaacttcttccatttcggtacgggcggggcgctggcgagctcgttcgggccgaatttggccagtcggcgcttggcttcttcctcgctcaggccgtgggatgggtcgacgttcagggctttggccacgtcgtcgacgctggtcagacttggatcagtatcccccaatagcgcttcctgtgcgcgcacttcttccgattccacgaccccgttcgttgcggtcgcggactttgcggattgatcgttacgatcatccatggtgttctccttggtatcgccgcggagtagtcagcctcggccggcaccgggttgtctctcccgggcggcgcaggactgcgcggttatgggcatcgacgcaattgcagccgatgcgtacgatgccattattccataacccggcggcacactggtcaagccatgacgggcgagctgggcgcggacatcgtcgagcggtacaacgactcgcccatcgctgcggccgcgctgcccgccctgacctcggtgcgtccgccgtacgcgcgtatcgtcaccgaggtcttgcgtctcatcgaaatcgggcccgggaatcccacgcacatctcgttgccaccggaactcgtcgtgcgcgcctcgagctcgaatcggcttatctgacggcgagggtgcccacttgcgcgccgacggccaccgtaccggaaccggtaagatccaaagcggcgatggtggccgggttggtgaacaccacgatgacgtcggtggctttgcccgcggccttgaccgcatcgaaatcgaccttctcgatgggatcgccggctgagaccgtctgcccggcactcaccagcatcgtgaaaggcgcgcccttgagttgcacggtatcgacgccgatatgcaccaacacctcgacaccgcccggagtggtgatgcccacggcgtgtttggcgtcggccacggtggtcaccgttccggaaacaggggcgacgaccagcccggaggacggcaccacgccgaacccatcgcccagaatcttggcggcgaacgtgtcgtcgggcactttctcgatggactcccagacaccatcgcatggggcgagaaccgacgtcgctgctggggcgggcgccgcctcatcgctgttgtggaacaaaccggagaacaatcccataatgactccttgaaaaccaatgatggacgataacggatgggttgcgtgacgccgatcatgtcgacgtcacgcagcccatccgtcataccaaacgacagagcgccaagcgctaggctttatgcagctcttccatggcatcggccacagcctgcacctgcgtgccgaccacaacctggacattcctgtcgtcgatgaccttcacgccgggcaccagcttgcggatggcgtccacatccaccttagcggtgtccttgacacccagacgcagacgggtcacgcagttctcgatgtcgacgatattggccttgccgccaagcagcgcgtagagcttcgcggccagcgcggcgtacttgtcgcgggagaccgcggcggccggggcggcgccggtgtcgagaatgcccgccacggcggcggcgccctcatcgtcaacgccatcgccacggcccggggtcttgaggtcgaacttcttgatcatgaacgtgaacacgaagtagtagatgaccgcaaagaccaggccctgcacgataagcatccacggcatatgcgcctgcggcacacgcagcgagaggaaccaatcgatgaagccggcggagaagttgaagccggcgatccactggaaggacgcggcgatgaacaccgacagggcggtgagcagcgcgtgcaccacgtacagcgggaaggcggcgaacatgaaggagaactccaggggctcggtcacaccggtgaggaaggcggccagaccaccggcgagcatcagggagccgacggtacgacggttctccggcttggcgcagcggtagatggcaaacgcgcccgcaggcaagccgaacatcatgatcgggaagaagccggcctggtacatgccggtgacgtactcgccccacggctggaatccaccggtggccagcacagccttggtggtgccgttgagaccgcccacaccgttccagaacttggtgatgtcatcaatgccggcaaggttgaaccagaacacgttgttgagggcgtggtgcagacccgtggggatgagcagacggttgaagaaggcgtagatgccggcgccgaccgcgcccatacccatcagggactcgccgaaggcgaccagaccgttgtagaccagcggccacacgaacagcagcaccagggaaatgaccgacatcagcgcggcggtcaggatcggcacgcagcgacggccggagaagaaggccaggaagtcgggcaacttggtcttgctgaaacggttgtacagcgcaccggacacgcagccgaccatgatgccgaagaacacgttcttgttgccgatggcgccaggagcaaaggcggccggcgggttctcggcgtcgaagcccaggaacatggaggccgagcccatgatcgtggtgatggtcatgaaaccgaccagaccggacagggccgaggcgccgtccttgtcacgggccatgccgacggccacgccaacggcgaacagcaagcccagattgtcgaggatcgccgaacccgtcttgcacagataggcggcgatgacgttgccgccaccccaaccgctcggatcgatccaatagccgatgcccaggaagagcgccgcggcgggcaggcaggcgacgggcagcatcagcgcgcggcctagtcgctgaatataggctttcatttctttctcccttcatgcgggttttccagcggtggagtacttctctgtgccctgctccgccgtcacgcgccgaccctccattggaccggccgatatccggcggggcgagtaccgctttcaacggataatagtacgccacagacgtcatgcgccgcaactcagcgcactgaaatcaaggctcggagaaccgtgcgcggatttcggaaacctaatcgaacatgcaaagcgtctgagccgcggaatgccgccattttcggtcatgttcgtttgtgcggaaacagttcggatgggtgcacggttcttactgagaatcgtcctctgcacccatcgcggcggccatggcggcgtctcgggaacccttggtgacccgcaggcccacggtgacgccgaccaacaccaccgtgcaggcgatccacagcatccgcccgccgaagccgccgatcacccagccgccgatcagcggcgccaatgcgatcgacaccgaccacaccacgttatagacgccctggtacgtgccgcgggcggtggcgggcgccatggcggcgaccgtggtggtggcgatggggaacgtgcccagctcgcccagcgtccacagcactacggcaagcgcgaacccgccccatgaatgggccacggcctgcaccgcatagccgatggcggtcaccgcaaggcccatcacgagcacacgcgaattgcccatgcgcgcgaacagtttcatggcgggaatctgcagcagacacagcatgccgccgttgatggtcaacagcaccgaatagtcgcccaaccccagaccaaggtccgtcatggcaatgggcaggccggaggtgctttggaagtacacaaggaagtagccgaacatcagcagggagaagccgaggaatggagtatcggtgagcacgcgccgccaattgcgagacatggcgccctcagggcgggccgccggcgccgaagtcgtcagatgcctcacttcgcggaagaacacgatcagcaatatcgtgacggcgatcatcaccgccgcctcgacgtagaacatcagcgaataggagatcttgatcagctgattggccacgatcgggccgatcgcatacccgaaattgatggcccatgattgcagcacataggcgcgctgttgacgcttgggaggcaccacgtcggcgatgtatgcggcgatggctggactgggcagcgaggcgaacgcgccgtatacgaacagggccgcgcccaacgccacgggatcggcgaggacggagacgaccagaagagcggcggccgcgccgatttcgccgatgatgatcatcgactggcggccgaaccggtcggacagcgcgccaccgaaaagacagccgatgatggcgccgaaaccgtacatggccacgaccgcgcccacaacgccttcgccgaggtgcagcgcggagaccaggtagatcgacaggaacgacgtcacgaagcgacccatccacagaatcagaatcgccaaccataatccccaatacagcagagacagtccgaatatcatgcgctgcttcttcactctcaataccttaccggctaccgacggcggaatagccgcgttttggcgcggggtgctgggacaatagcacctatggctatcaaaaaaggaccgaccaaggggtcgggtggcaagcatcgcaacaaactgaagggttacggccccactccgaaggccgaggaccgcgtctaccacaaggcatacaaggccaagaaggcggcggaacgccggcagatggccgacccgcgtctggcggctcgccgccgagtggacaagttcgcttcggcggacacctcggatctggtgtacggccgcaattccgtgctggaggcactgcgcgtgggcgtaccttcttccacgctgtacatcatgtcgcgcatcgagcatgacgaccgcacccgcgaaatcgtgaagatcgccggcatgaacggactgcacatgctggaggccgatcgtctggagatggatcgtatcgcccgctccggcaaccatcagggcgtgattctgaaggtcgatccgttccagtactcctctctgagggaattggccgaccgtgccgagaagaaggccaaggccatggaggctgcgaattcggccgccgcacgcatcgcggcccgcccgctgttcattgcgctggacggcgtgaccgacccgcagaacctgggtgccgtgattcgttcggcagccgcattcggtgccaacggcgtgattctgcccgagcgtcgttccgcttcggtgaacgccgcagcatggaaggtatccgctggcgcagcggcccacatgccggtggctcgcgtggtgaacctgaccaaggcgatcgaaggcctgaaggagcgcggctactacgtagtcggcctggacggcggtggcgacaagctcgtgggcgaaaccggttttgaaaccgatccgctcgtggtggtgctgggatcggaaggcagtggcctgagccgattggtgcgcgaatcctgcgacgcgattgccggcattccgatcagctcgtccgtggaatcgctgaacgcttcggtggccgcgggcatcagcctgtacgccgtgtcccgcgcccgtcgcgagggcgctgaatcggctcagtaagctaagcagccaaacaaagaggtccgccagcgatggcggacctcttttcgtttatgccgcagagagcgtttgggtgagcgcatgggactcgccgggttcaagtcttaccgcgtgttcgcggcaggcggcggcctcgcagcatacgaagtgacgccattcctcgttgacggaatcattgaccagcacgccgtacggttcggcggggttccacaccacggtttgcgcagagccggacttggcaacatgaatcgtgcgaccaaaaccttcgtcatgcagttccactgcggcagtcgaggcatatacacgatccaccgggccatcgaacgtcacggcctcgtccggctgctcacacggcgcaaaaccattggtcgcatcctcataatgtgcgtgctcaagaccggtgaggcgaatctgcgagacatcgctgacgtggaaatacgtatgcagtgcggcttcataggagaacggcgtggctccagtgttggtcactgtaagcgtcatggtaagggtatcggcaacgtgcacctcataatcagcacggaaactgggcacggcatccccctcgaaccaaggcagcatatcggaaggcacatcagcctcggtcaggctgtaatgcgcatagctattgctgaaggactcagcatcgagatgccactgtctggtacgaacgaatccatgattcggctttttgccaagaccatggccgtcggcaaagccgggcccaaaccacgggaatatcaccggaacaccgccgcccagcggcctaccttcagcaaccaccaccgaagaaggtgcaaacaccacatccgtggcctggctcagcggccgccagcgcagcagatgcgcgccgcggtcgctgatggtggcggaacctgcggaattgtcgatgttgcgaaacacgaaatcagtcattacctctcctcaaacatcggaaaatagtgctgcggtttatcagcgcggggccgattactgccgggtaagcccaagttcagcgaggaacgcgaccgtctgctccttggttttgaacacggcggtattgccgagaatacgctcgcacacgctgccaagttcttcatgaacggcttgatgaatggccgctcggtcacgattgccgttcagtgcggcggtcagctcgtcccattccagcgtgaactcactcaccgatgcgggtaacggctggccctcggccaaggcgttctcaagctgggcaagttgatcggccaaacgtccgggcagaataaacagaccctgcacttcgatgaggccaataggctcctgcttgatcggccagaattcgggatgcgcgtggaacactccctcggggtattcgctgctgacggcattgttgcggaaaatcaagctcatctcgtacccgcgatccgtaatgatggcacttggagacacagcggattgacgattaccatccgcgtcatggctggcgatgttcgctgcactatcgtcaaactgctgccaagcgagtcgaatcatatcgctgatttccacgatggcatcgcgattgcgagacaccacacgtacggcggtacccggccagtcgaggatctcaaccacggcatctggatagccgttcatgtggaatgtggcccaagcggccgccttgtgcatgggcagatgctcgccgccgccctgatagtgatcatgagccagcaccgatccgccgatacgcggcagagcggcgttgcagcccaggaagtagccggggaatcggtcaacgaagtccagcagatggccgaaggtatcgcggtcaacgtgcataggcgtgtgctcggtgttgacgcaaatgccatgctggtggaagtagccgtatggagagaactgccagaaccacggttcgccgcccagcgtgaccggcactgtgcgcagcgtacgcttgtcacggcccgcgaaaccttcgttctcatggcatatcgtgcaggaagggtagccacccgccacgctattgccggctgcagccttcttcatgttcttgaattccggcttggcgagattgatggtcacggtgacgccatgcgaatcaaagcgcggatttttgtcgagtacggctttcttgacgtagttgttggccacgctgtagtcgtagaaccagcgcatggcctccataccatcgttggattgttcaacggccacgaaccgatcctgtacagcggacgggctggcggacagcagacccatcaccacatcggcgtatcgcggcccttcttcaggctcgaataggccagcggcaacgcatgattcgcggaagcggctcaacagttcgtccggcgcggtgtcgtctgtagtctctccggtcgggcggtacgaatccagctcaaacagttcaaaaatgcgattacgggtccaatccgcatcgcgcgggtcaaggttaagatgcttgccggcataatcgaccagtacgtcgatgctggcatacacgtcgttcaggctgctgacggtgttgtctgttgcttcgttgcgagacattggttcgtctttctgcttattgttaattaccctaacaattaataattatagacgacccacggtcaacggcacacgcgatccacacacataagaaaccgcacctccgatcatcgaatctgaattacttcagtccaacaatcggggcgcggttcacagggccgaatatataaatccgcttaatggctccacaccgccgcgtcaggatcgtcgtcggggttgtagccgtcgtcgtccaggccgccgtaagtggtctcatcatcgatgacgccggaatcggcttcttcgttgagttcggcaagcgccttggaatcgagcttatagttcggcaagacgttttcgatatagctggtcacagcctcgcccatcggcacgtcgtggccggccttctccgccaagaaccaacgatggtcaagcacctcgtggaagaactgcgccggctcgatctgcgaacggtactcacgcggaatcatgcgaaccgttggctcgtacacttcgcgcatccaatcggtggccacgatttcgagctcctcgccgtcacgccatgtggaggcgcggtaggcatcgagatcgttgagcaggcggcgggcctggttctcctgcacgtccaaaccagtgagacgcaacagcttgcggttggcgtaaccggcatccaccacacgcgggcggaccagcacgcgcttgccgtcctcggcggtcttcatctccagctcgtccacgtcgaagcccaggtcgttgagcttgttgacgcgctgctcgatcttccacatctcatccgggccgaacttgtcggtgtcggtcagggcgctccacaacgagtggtagcggtcgaccagacggttgcccacctcgatctcgtccacgtcgctcggcagcagacggccagaagccaaatccatcaattcaccgatgatgttggtgcgggccaggtcgatatcgtattcacgctggccatcggtaagctgcacctgcaaatcaccggtttcggcgtccaccaggaaggcggaaaacgcgtcggcatcacgcaggaacaggacgttcgacagcgacacatcgccccagtagaagccggccaagtgcaggcgaaccagcagcacggcaagggcgtcgatcaaacgctcggcagtatccggctggagattgcgggcgaacagcgcgcggtacggcagtgagaacttcaggtgacgggtgaccagaatcgcttccagcggttcaccgttgcggtcatgacgaccggtgaccacggcaatcggggtgacggtcggcaactcgagcttctgcagtcggcgcagaatctcatactcgcgctcggccacctgacgggtgatctctttcatggcgtacacctcgtcgcccacgtgcacaaaacgcaccacgtggcgggagatgcctcgcggcaggttggccagcaggtcctcgggccaggtggccaggggcttatgccagggcagcgtgaacatcttcgggttcgagctggcggcggtgatcttcaatgcttgcggctcagctgaactggcatgttcgtcttcggctttgacggacgtggccttcagcgcgcgcggatccatctggggcaaatcgttcaactccatgtgttcgattttacgtggtgcttgggaagtgcagcgagtagcggcgacttcggcgcgttattctcgcatacgaataaatctcatactgaatcagagacaataatgatgacgctctcagcttatccagcccgttatctatttgtaagtgcaacatccttgttctcggctgattctggcggttcgtcggcgaatgcctcggcggggggtgcggcagccgagcactcgcatgggcctgttgtcggtttcgtcgacggtctcctgcagttcgcgtgccatggagggggcgacgggcgtgcgtctgggcaggtagcggcggatcatgccgttcctcttccgacaggtgcgaatacacctggcccaaggcgcaacacccctccgtttggctatccggacaatctccaatctaacgggtgctgcactttcaattagacaacggacaaaagaacaaaaaatgttcatttacggggccagttagcgtatgtctttctgggcaaaaagaaaagccccgcagctatgcagggcttttccaacgaggtcataagagaggaagagaacgaccccgtttaatggttgacgaagctttgggacctcgccaagtatctactagttcagacgcagctcggtggacggtgcgaacaggtgcatctttgccggatcaatcttgatcttgaccgtggcaccaacctgcggcagagcgcgcggattcacacgaatcgtggtgagcttgttctgatcggacatgacctgagaagcctcagctgcggagccatcggtgacgatgttgccgtagatgtagccatcggagcccagatcctcgacgttgacgaccttcagggagaaggcgttcgggtcatcagccggagccaggccagcgtcctcaggacggaagccgaccacaatctggccgttgtcctccggagtgagcttggcgacggcgtcagccggcagatccacggtgtcctcaccgatcttcgccttgccgttgaccaccgggtgggtgttcaggttcatcgacggggagccgatgaagccggcgacgaagacgttggccggacgatcatacagctcggtcggagcaccgacctgctgcaggataccgagcttgatgacggcgatgcgatcgcccatcgtcagagcctcggtctgatcgtgggtcacgtacagggtggtgacacccagctggcgctgcagagcagcaatctgggtacgggtctggacacggagcttggcgtccaagttggacagcggctcatccatgaggaagaccttcggctcacgaacgattgcacggcccatggccacgcgctgacgctgaccaccggacagagccttcggcttacgatcgaggtactcggtcaggtcgaggatctcagcggccttctcgacgcgcttgcggatctcttccttcggagtgccggcgatcttcagagcgaagcccatgttgtcggccacggtcatgtgcgggtacagggcgtagttctggaacaccattgcgatgtcgcggtccttcggctgcatcgtggtgacatccttgccaccgatgaggatgcggcccttgttgacctcttccaggccggcgagcatacgaagggtcgtagacttaccgcagccagaggggccgacgaggacgaggaactcgccatccttgatatcaagattcagatcatccacggagggcttgtcgttgcccgggtagatacgagtgacgtggtcgaaaacgacttctgccataattactaatcctttcagaggcaggtacgtgcctcacgatccgttgtaaagggatttgttctttactgtgcttccgccctcgctaccgacatacaactttgctctcggaaactgcaagcttcagcgtttacttttttccggttcagtgaaggttctcttcgttgagccaagattcactatacacggccttgcgaccaaggcaagtggcgtgtctgaaatgtaggtaacatttgagcactccgccatattgtgttgagtgtttctcccgtatggaacgaaaataagagcaaccagggtgcctcgggcaagacgatgctcctctatgcagcggaggaatctttctgggctcgtacgatgaacgtgatctcgccactacccggcgcatgcaacgtggtaccgaacgcaatcgtggagccgaatgcatcgattacggtggagtccatctccaaaacctgggtaccatcgggcactccgaaataccatgccatccgcgtatctaacgcatgcacgcgcacggcggcatcgttctctaccaaacgcaccgcgtaattatgttccagaaagtcatatagcgactgatggctgaaatcctgatcgactaccttcgggaaccgcgccgccgacaagaacgtgatcacatgctgcttgagcttatcatccacgtatcgcaacctctccagtcgaaccaagtcggcatcatccggcaatcccagacgttgcgcggccttcgcgttacgcaccacggcattgtcaagcaccttggtgtccaccgtattgccaagatcggcctgttgacgaaaaaaacctcgaatatggtcgctaatcacctcatgctgggactcaccttgcttggcagtgcgaaatgtacctctaccctgctctcgaaccaacaggccatcttgaatcaaatcatccactgcatgacgcagcgtgatacgacttaccccatactggtcacagagctccggctcgggcggcaattgttcgcctgaatacatcgcctgcgcacgctggcgaagattgtccctaaccgcaatatacttcggtacaccttccgccatggttgtcctccttgccttcctttacgactgtactgtgccacggatacacaaaccgccgggattggcaacccattcccggcggttcgcagaccgccctccatatatctgcagagcggccatgcaccgattatttcgcttctacggcagccttcttcttctcacgcgcactcatcgcaaacgatgcggcatagaacaccacgaccgaagcgataataccaatgatgagaccaatctgaccacccttgccgaactggccaagcagaataccagcaacaccataatccgcatcagaatatgtggcattcgccatgccggtgtcgccaagcacaggcagcaggaatagcggcaggaatgtaatcgccaaaccattgacgaaggagccaatcaccgcaccacgtacgccgccctgtccgttaccgattacaccggtggcgccgccggtcatgaagtgagccacaatacccgggataatgatggtggaaccggccagagccatgattcccataccgaccacaccaccaacgaagctggagatgaagccgataagcacagcattgggggcgaaggtgaagatcatcggcacgtcaagggccggcttcgagttcttcacgagcttctcggaaatacccttgaacgcaggtacgatctcaccgagtaccacgcgcacaccagcgagaatgacaaacacgccagcagagaatgtggcagcctgcaggatggcgaacacgatgaagttttgcccatcgctcagctcagattcaatgtaggagctacccgcgaacagcgcgacgacaacataaataacggccatcgacagggcgatgatgacggtggtgtcgcgaaggaaaccaaggcctgcagggaacttgatgtcctcagtggacttggacgggtgcttcttagaacgggtcagacgagccacgagcccgccgagcgcaatgcccgcaccaccggtgtgaccaagggcgacatcattggtaccagcggcatccttcatgaacggctgtacaagcgcgggagagatggtgacaatcaaaccttgtgcgatggagccccacagaatcacaccccaagtcgacataccggcaacctcgagaatcacggcgaccatcgtagccatgtagaacgccacatgaccggacaggtagatgtacttgaaacgcgaggtcatagacagcaggatgttgacaatcatgccgaagaagaagataagggcggcttcagaaccatacttcaccaagaccgtgccgacaatggcttcgttgttcggcaccacaccctgcacattgaatgcatgctggaacatgctgccaaagggatcaagtgcgccggaaacgacggaagcgcctgctgccaacaccaggaatcccaccatggttcggatggtgcccttcataatgtcggtagccttcttgcgctgcacggcaagacccaccaacgaaatcaaagccacaataatggatggctgccggaaaatatcaagtagcaccgataacacgccgttcatgctctctcctttaatctttatgcttgtttgtattgttgttttccggatttggcaccgggtcggggcaacaatgtctcttcccaccaccgaaaagggttatttattgggaacctcgacaccgtgtcgcttcagcgcagcagctacctgtgcggtgatgttgtccatgtcaataaggctgtccagaacgaccacgtcatccatcagaccttctgcagcttcagcgatgtcgcgcccgacgaacaacacatcagcagaggtaggagtaacggaggcgatatccatatgatcggtttccacaccggtcacaccaagattgctcagcgctttctcgatgttgagttgggtcataaagctagatccaaggccagtgctgcatgcggtgatgattttcattgaagtacctttcgtatgagttgtttgatgagatggaagtgcagtctgtcaggccagcgcagcggccaattcatcgacgttggaggacgcgttcaaagcagctagtttgcctgaatcggtcaacaaaagagccagcgattgcataagatcgatatgcgcgtttgagtctttcgcggccaagcaaaacatggtgttgatgggatggtcctcatcatcggccagcaggaacggcttacccactcgcagcacagagagcgatgtggagaccactccactttcaggcctcgcatgtgcaagggcaacacctcccccgagatctatatatgttcctcctggactggcaatcgatgtcttaatggcatcgacatagccccgctcgatggtgccggcgtcgagcaagggacgcgtcaccaagtcgactgcttcgcgccaatccgatacctgatcgacatacagcatgccgttcggttgaaaatacgacataagcacgatgcctccttgcaatgcattaaaccactgcggccagctacggccatcagacgaatttaatgttgaggttcattccgcttcaccaaattcgtattatcatcatatcgtcataacgcattatcgtcatatcggcgtgtcgctatggcgaaccgcaatccgtatgctccttttatcagccagaatcagattcgaattcagtctcaacaagactgttaaccaccgaccaatgaagcatcgaggccggctcaatcggcaaatgcaacagtaagaacctagattgccccgaaagtcacgccgttgcggacggccttgcgttcggctttgcgctcctcggcattttcgatgcgttggatgcgcagctggcgccaatcctcgcgcatatcgcggaagcgttcggccagtgtcacgtcgtcgttatcagcggcggcatcagccgagtccgcatcggcctcgatacctgcgaacttggtgactcccagtttcaatagacccagtaattcgctcagggcttccggcatgggctcttcgccctcatcggcagacttggtcagcccttcgatacgccggcgaagcgcatccgcatcttcaggatcaatcttgagaccggcgatcaacgactgacgcatggtctcgtaatcgaggttggcaaagaagttcagctgctgcagagtcatgaatcccttgagttcagggaatcgatgaacaacatattcttcgcggtcatcggcggcgcgcgtccaatcgcgggtgagctgtggatccaaggtggcggtaatcgacccttcgcgcagacgatagtgatatagcaccttaggaatgcgcaccacgcgcgtggcctcgccgatcacattgcagatgcgggagagatcctcgattttgcggcccactgggaaggagaagccgtgttcctgataggtggacgcgggtgccagaaaggcccagaaatagccatcaatctcggctttgacctgcttcttgatggcttcgaccggagtcagcacctgcacttcatcgaaatcattgtgacgatagctggagagcagtggcttgtcgttctcggagatggtgtcgaactggaacatcaccagatcggcatcgtattcacgcatggcattcaggcagtcttccaccagcgtgggcgccacagtgtcatccgaatccgcaaagtagatgtatgagccggtcgcctgggcgatgccggcattgcgtgcgtcggacagtccgccgttgggcttgtgaatcacccgcacgcgcgggtcgcgggtggcccaagcgtcgcacatggccgggcagtcgtcaggcgagccatcatccaccagcagaatctcgaggttgcgataggtctgagcaaccacagacttcacgcattcatcaaggaatttctcgaccttatataccgggatgatgatgctgaccaacggctcctgttccatgcctccagcgtagcgccgtcgcgcgaacgcggcggcgctgcgggttcgcggaccgcgaaacccttagaaatcccagtcgtcgtcatcggtttcttcggccttgcccatcacgtaggaggagccggaaccggagaagaagtcgtggttttcgtcggcgttggggctcagcgcggccagaatcgcagggttcacgtcgcagatctcagctgggaacagcgccgggtagccaaggttcatcagagccttgttgccgttgtaacgcaggaacttctcgacgtcctcggtcaagcccacacggtcgtagagggactgggtatactccacttcgttgtcgtacagctcgttgagcaggtcgtaggtgtagtcctgcatatccatgcgctcggcgtcggtgagctgggcgatgcccttctggtacttgtagccaatgtagtagccatgcacggcctcgtcacggatgatgaggcgaatcacgtcggcggtgttggtcagcttggcgtgcgcggagaagtacatcggcaggtaaaagccggagtagaagaggaacgattcgagcagggtggaggccaccttgcgcttgtacgggttgtcgccctcgtagtagtcgagcacaatctccgccttcttctgcaggaactcgttgttctcgctccagtcgaaggccgcgtcgatctgttcggtggagcacagggtggaaaagatggacgagtagctcttggcatgcacggattccatgaaggcgatgttggtgtacacggcttcctcgtgcggggtgagcgcgtccggaatcagggagacggcgccgaccgtaccctggatggtgtccagcagggtcaggccggtgaacacgtgcatggtgagcgtgtgttcgtcttcggtcatcttctgccagctggggatgtcgttggagacggggaccttttcgggcagccagaaattgccggtcaggcgatcccagacctcgaggtccttctcgtcttcaaggcggttccagttgattgcggagacgcggtcgatgagtttcagcggtttgcgcggaatagagataggtgccatgagtagtgttccttttactcgttgtcgttatcgttatcgtcgttggacttgttttcgaactcctccggcgcggtcagccggagcagtgccttataaatcattggtgacattgtggttccttagagtggttgggctcccatcagtccgcttcgcggccagctcccctcagggaggggagccaagaaagggagcccgatatatgaatggacatctgtggttgttcgatgcgtgcggcctctaggcgcaccgagggaaggcgtacgaaggtacgtcgaccgaggagcaacgacgaggacgctccatcgaacaatcagagcatgcaggagacgcagccttggacttcggttccttccagggcttgctgacggatacggatgtagtagagggttttgatgcccttgcgccaggcgtagatctgcgccttgttgaggtcgcgggtggtggcggtgtccgggaagaacaaggtcagcgacagtccctgatccacgtgctgagtggcctcggcgtacgtgtcgacgatggccttccagccgatttcgtaggcgtccttgtagtactcaaggttgtcgttggtcatgtaggccgccgggtaatagacgcgcccgattttgccttccttacgaatctcgatcttcgaggcaatcgggtgaatcgagctcgtggaatggttgatgtaggaaatcgaaccggtgggcggtacggcctgcaggttctggttgtagatgccgtccttcaaaatcgcgtcgcgcaacgtctcccaatcggacacggtcggaatctcgatgccgtacttggcgaacagctcacgaaccttggcggtacgcggctcaagcgagcggcgaccatcggtgtacttgtcaaagtaattgccctgaccggccggcttggcgtagtcggacgtagcgaagctcttgaacggatggccgtgttccacggcgagcgcgtgcgaggcgcggtaggcatggtaggccacggtcatgaagtacatgtcggtgaagtcgaggccttcttcggagccgtagtgaatgccttcgcgggccaggaagccgtgcaggttcatctggccgaggccgatggcgtggccttcctcattagcgcggcgaatcgagggcaccgcgtcgatactcgtgtgctcggccaccgaggtgagcgcacggatcgcggtttccacggtgtacgccagtccgccatcaattgccttggcaatgttcagcgaacccaagttgcaggagatatcgcggcccacgtgcgcataggtgaggtcttcgttgtatgcgctcggctcctgcacctgcaagatttcggagcacaggttagacatggtcacgcggccttcgatcgggttggcgcggttgaccgtgtcctcaaacacgatgtatgggtagccggactcgaactgcagctcggcgatggtggtgaagaacttgcgggcgtcgatgtaggtcttcttgatgcgatcgtcggccaccatctcgtcgtagtgctcgctgacggagatgtcggcgaacggcttgccatatacgcgctccacatcgtaggggctgaacagggccatctgggccttctgcttagccagttcgaaggtgatgtccggaatcaccacgccaagcgccagtgacttgatgcggatcttctcatccgcgttctctcgcttggtgtccaggaatcgcaggatatccgggtggtgggcgttgaggtacaccgcgcctgcgccctgacgtgcgccgagctggttggcataggagaaggaatcctccagcagcttcatcaccggaatcacgccgctggactggttttcgatgtgtttgatcggggcgccgagctcacgcaggttgctcagcagcagggcgacgccgccgccacgcttggaaagctggagggccgcgttgatgccgcgcgaaatcgactccatgttgtcttcgatgcgcaccaggaagcagctgaccggctcacctcgctgggccttgccgaggttcaggaaggtcggggtggcaggctggaaacggccggcaagcatttcgtcggcgtattcgatggcctgctgctcgttgccggcggcgagctccagggccacagcggcgcaacgctgcgggaagtcctcaagatagaggcgaccatcgaacgtcttgagcgcgtaggacgtgtagaacttgaacgcaccaaggaaagtgccgaactcaaagccggcggattccacgtgctcgtagatgcggtcgaggaattcagcggagtactggttgaagaccgcagggttgtagtactggttgctgatcaggtagtcgagacgctcggcggtggagtcgaactgcttgctgttggcggccacatggccggtcacgtattcacgctcggcggccttgtccttatcgaactggatcttgccgtcggcatcatagagattgagcatcgcgttgagcgcgtggtagtcgtgtgccggatcgtactgttctgccgaggtgtcggtggtgttgtcgagcgacagttcggtgttggtgaggtcggtcattggagtccttattgctgttgagcgaagaagcggacgaggccgttgcggacggcagcggtgtcttctggcgtacccatgagttcgtagcggtataggtaggggacgtggcatttggcggcgatgatgtcgccggcggcacagtaggcctcgccgaagttggtgttgcctgaggcgatgacgccgcgaatccatgcgcggttgtcggggtcattcaggaaacgcttgacctgaatcggcactgctttcttgaccacgccaccgccgtatgtgggcaccatgatgacgtatggctcgcggatgttgagagccgaatcagctgctcgcagtggaatgcggtagacgttgatgccctcgtcctgtaatcggcagctggctacaaatcgcgcggtgttctcggaggccgacgaaaagtagaccagtgctccgatcacattgctggtggcggcgaattcaggctggctggcaccgggaacactttccgcggtgatgccggattcggtctggctcacgcggaaaccatggccgaagcattggcctcagcgcttacctgctgggcaacctcacgaatcaaatcggggcggtagccggtccatgagttgttcggcgtgatcaccactggagcctgctggaagcctgcggcctgcagctgctcgagagtgcccgggttctccgtcaggtccacggtctcgaacggcacaccaagcttggtgagctggcgcttggtggcgttgcattgcgggcaatgcggcttggtgaacacggtgacagtcatggcgactcccctccatctatctctgttgaacagtgaaacgatggccatattacatctgtgtagcttgaaatcaatgcactatatgtagtggcgtgtatcacacaacaaacctagatatagtggtttctgttgatattccgccattcttgagaagccctgaaaatcagcgtgcagcgactcaccaagttatatgtggcattgttcacatttgcgctttgatcgtcatatttaagtttcgaggggctgatttgaacctttccggaggtctatctccgtttcaaggggccggtcatccgccgaaacacaagtacaaacgccttcttgccaccgtcatttcgccattcttggaccgcttctacttgggcaccagcccctcgaaacggagatagagcttcccaaaaaacaaaatcagcccctcgaaacggagaatgaacgccgacgcccccatatgacggcaaaaggcctgacctgtatacgttcgtacacaatgtgaaatgtatacgaacgtataacactgatgtctgaagtcatactccgcagtggcgccgcaggtgcgccactacaatcggaatatgggactgaagacttggaagaagtggacggactggccgctgatggtgttgtccgtggtgtttctggtggtgtattcgtgagagattctctcccgtacgtacatcgcgatgcgccagaccagggcatcaacctcaggctcaccgttctcgtactgccaaccgttagcggtggtgtacaagatgttgtgggcggcggtgcgcattgccttgacggaggtggcggacttgtcggtgatgtggttggtgatcttggtggtggccagcatggaatcgttgccgttacggatctcctgatcaccattctggtagccgtagccgccgaagtaatcggtcagaacgaagcccttgaagccccactcgtcacggagcacggtgttcagcaggttgttggaggcaccggcataggtgtaaccgatgtagttgaaggagctcatcacagcctgtgcgccgccttccttcacgctcatctcgaacggcttgaggtagatctcgcggatggcctgctcgtccgcccaggtgcacaccatgttggtacggttggtttcctgatcgttcagagcgaagtgcttcatgaaggaatacacgcccttctccttggcaccggcgatctcgttggaagccataacactggagagcagggagtcctcagagaagtattcgaaggtacgaccggagaatgcgccacggtggatgttcatagccggagcgcaccaaccagcaacatgcatgtcgtgagccatatcgccgatcatctcgccgaactgcttggccacattcgcgcccacgactcatccaatatgacgtaaatggcacttcttgatacgtaaacggcattttttctcaaatttctgtcgctcagatgccgtcagcgtcacaaattcaggaaacaaggccatatttcctgaaaatctgtcactgaggcaccgtcagcgtcacaaattcaggaaacaaggccttatttcctgaatttgtgacgctgaacgcccaagcaccactccaaagacgccaccaagctaggatagagggcatgagcgatttgaacgcgttgaatcttgaaccgggcgaagtggttggcgggtatacgctggtctcccgactcggcgcgggtgccatggggtcagtatggcgtgtgcgcgacgatggcggcactacctatgccatgaagattctgcgcgattcgttggccgacgaatcgggaacctcgaactccgccaacacagcagcgcacgacccggacctcaaacccaacatcacgccgcgcgagcgcctacgtcgtgaggccatggcgctgaagaaggtcaatcatccgggcgtatgcggcatcgttgacatggaactcgatgattcgctggcgttcattgtcaccgagctcatcgagggccgcaatctcaaggaagacgtggaggtcaacggccgttacatcggcgacgatctggaacgtctggcccgtaaactcatcgacgccaccaaagccgtgcatgcggccggcatcgtccaccgcgacatcaaacccaccaatgtgatggtctccgccgccggcccggtgctggttgacttcggcatcgccatgggcgagggggaaagccacgtgacccgcactggactggtgatgggcacaccggggttcatagcccccgaaatcattgacggcgctgaatccgatgagatgaccgactggtggtcggtggcctccgtactcgcttttgctgcgatcggcgcaccggtattcggtaccaagccgatgatggcggtgctggagcgcgaagcatcgggcaacgcgaaccttaccggactgccggccggcacgatggccgcgttccgatccgccctgaaccccgaccggtcaaagcgttgcacgccggaccaattgctgaacgccatcgctgtggacgcactggatccgagcgtgtggcaaggcactcaggccggaccgttcgccgccggcgccattgccggaacggctgccacaattgccgccgatgcagttggaaccgaggcgatgcccccttttggcgcaaccgccgacgcggatagcgataatccgcggtccatctggcgtcaggacgactacgccacggcggcaatcgactcatcgtcttcgccgacgctcagcgacggcacggcaaccgaagcattcccggcaactaccaacgctgggagcaatctctcgtcggatgatgaagcaacacaactcgtaggcaatgccaccgaaaccgccaccgaggcaatacgcccagccgcacagcgtacggtgcccatcagcgatgaaccaccggttgctcctaccacgccactatccgaacgtaccgccgtactgcctgcaccacagccagtgccacaacccctgcaacccacaccgcaaccagtgccactaggccagaacggatggaacccggccgacgggcaaagcacggctgtggatccggcgattcgccccgcattgcagcatgtcatcaaccagaccgcgcaatgcgttcccaccgaggcgcttatccaaggcccgcctgcacccaatcccgcggatgtgcgtcgtggaatgtatctgcaacgcggggtattgccgctgttcctgttcgctgtgcctttggccgtgctggctgcgagtttcccgctgatcgccttgattgcagccgaaatactgctctggctgttgttgacgttggcgtataacactgagtctcagttggagcgcgaaggtcgacgcggcggcgagcgcaaaagctccgattcgctgattcgcgtggcaacgctgccgtggcacatcgtcaaggcgctgctgctgtcgataccgaaactactgctgctcaccatcgtctatctggccggtatcgccgtggccgtggccgcgttgggactgccggtgcgcaccatctcgtggtatttcactgcgagccggggcgttccggttccgctgctggatgatatgccgttctccgtctccggtctggcacttggtgggttcatggccatcggttggctgatcaccgtattcgggccacagtcggccatgccccggttgggtgccggcgtgctgcgcggcatcaggcacaacgacctcgagccgatggcgcaaccaggggcagacggtctgccggccgcatcaatccctcggcaaggcagccgcggcacggtgctgctcaccctatggatcatcatcacgctggtattgtgcgcgctgccgctgctgggcatgccaatcagttgggtcccgctggcgtaatctgcattacttttacagggaattcacctcccagctgatctgtacgcggtcttcctcagggccggtcattatgatgggccccaaatatcgaagcgatttcaaggggagatccatgtcagatccgaagcgtcaggctaagcgcgccacccgcgccgagcgacgtgcggccgaggcggcggcccagcaggcgcaggccgaacaggcagccaaggagcgtaagcagcagaccatcatcggctgcattgtggtggccattatcgtggtgctggtggccatcgctggattcgccgtatacaaggccatgcagccgtccaacaccagcagcagtagccaacaaagcaacatgaccgtggacgaggcctacagcaagctcaagaaagtcagcacccagccggctaacgccgacgacaaggccggcttcgtgatctccaacaaagggtatggccagaaggccgagggggctcccaccatatccatctatatggaaccgctgtgccccggctgtgcctcggtgaaccgccagctcgatcaaacgctcgtcaagctgatgaacgccggccagctcaacatcgatttgcacttcctcaatttccaggacaacaagagctccgacaactactccaaccgcgcgttcaacggtgccatctacattgccgagcatgatgacgatccccaccacctcatgagctacctctccaacatctacgctgaggatttccagccgggcgaattgtccaattacgagccggtaggcaacgccaagctggagaagcaggccgtcaaggccggcgtgagcgaggatgtggccgccgcggcgttcagcggcaagaacgaatacctcgactggctcaccgcctccaacaactacacgatcctgcgccccgaactgttcaacagctccggcgccttctcctcccccaccctgaccatcaacggtgaatactgggatctgaagcagctcacgttggcggataccagcatggtggacggattcctcaagtccatcggattggacgccgaccaggtgggcgtgggaggcaagatgccttcaatcggcgcggacggcaagccgatttcagtggcctcctgatgcaccggcccggtcgatgccctaggaccggcgtcgaccgggccgctcacgcctccgcccgaattgaccactcgggaactaccggtatactagtcatttgttcgcaacactgcttatgcacgttgggattatgcctctttagctcagatggccagagcggccgccttgtaagcggcaggtcgtcggttcgatcccgacaagaggctcgtcgcgcaggaaaaagcgtattatgggtatacgtagttttttctacgcacatcattcttaccttgggtaagtgctccaggagccttccccccaactatgggcttcctggaatgagggcggagcgtcccccaactagctccgcgccttaaagggggcgggaacatccccttctctcccgcccccctttttttcttttctctgccgtcctgcaaccgagcaggaatggtgatagtgccgaacgaataagccatgcaaaccagaccagccgttacgatgggtggcgtagttgtcagcagtaaggaagaggaacatctatggcacggcgttggaccccgcagcggtttgttacactgcgtcgcatccgcgtaattgcctgtgctacggcactcaccgtggcgatggtcggctcgtttgcattcaccgcaaaaaaatccgtggccctaaacatcaatggccagaccacccaggtcaccacctacgctatgaccgcatcccgcctgctcgaggagcagggcatcgacgtgaaaacccatgacatcgtcgagacctcgtccggcaatcagcttgccgatcatgccgtggtcaccgtgcgttccgcataccaaaccaccatcaccattgacggcacttccgtaccattctggaccgtggccaccagcgcagaccagttgctcggcttctttgaggagaacaacgccaacgccgccaaaatcacggtcaatatcaataacgtgtacaaccagctcaccggcggtctggtcatcaaccaatccggcccggtcaccgtcatcgcggacggtaagacttccgaagcccccaatggcaaactgccggctgcatccattctggattccaaaggcatcacgctgggcaaagaggatcgcatcagcgtggaaaagaacggcgatgagaccattctgcgcgtgcagcgcgtgacgcatggcgtggaaaaccgcaccgtggtcgtaccgttctccacacagaccgtcatcgaccctaatctggcgccggggcagtccgagatccgccagcaagggcaaaacggcgagaagacgcagatctataacgtcacctatgtagatggcgttgccgaatcggaaacactacaatccgagaacgtcaccacgatggccgttgaccagatcatcgccatcggtccagcgaaggctgaatcatccaccaccgattccggcagcactgacaacaatcagggcaattccggatccaataagccaaatgattccgcagataattcgtccaacgaatccagcaaacccaccgataccaataagcccaacaagcccgagaacaccggtactactgacaataagaacgacagcggtacgggcaacacgggcaataccagtggcaataccggtaataccggcggcaacacaggcagtaccgataactctcaaaatgagaacaccggaagcgacaatagctcgccatcgactcccactcctgatccggctccatcgggccgtctttggcatcctaccgtggctcaggcgcaatcctatgcagccggcgccgcagcccagcgcggctggaccggcaacgactggacttgcctggtcaaactgtggaaccgtgaatccagctggctctggtacaaggaaaataagtcatccggcgcctacggcataccgcagtcgctgccggccagcaaaatggccgcattcggcgccaactatcgcgatgatgccgccgtgcaaatcgattggggcttgtggtacatcgcccaacgctacggcagcccgtccgtagcctggcagcattcggaacaaaccggctggtattaatcggacacaaggaagcactgatgagcaacaacacctccaccactggccatctactgggtgcggccgatattcgccgcatcgcagccgaggccggcatcagtccgaccaaaaaattcggccagaattttgttattgaccccggcactgtgcgtcgtatcgtgcgcgaagcggatgtcacgaccaatgatcatgtcatggaggtgggtccgggcctcggttcattgacgttggcgattctggaaaccggtgccacgatgaccgccgtggaaatcgacccgccactggctgaacgcctgccccgcaccgtagccgagttcatgcccgaagccgccgatcgcctgaccgtcgtcaatcgggatgcgctgacagtcaccccggataatgtgcctgatttcaacggcgataccagcttcaccttggtggccaacctgccgtacaacgtggccacgccgattctgctcaccctgcttgaacgcttcgatagcctcggatctttcctggtgatggtgcagaaagaggtggccgaccggctggccgccaagcccggctcgaagatctatggcaccccaagcgtgaaacttgcatggtacggcactgccgaacgagtgggcgctattgggcgcaatgtgttctggccggcaccgaacgtggattccgcactggtgaagttcaccagatacgccgcagatgatacgcaggcaccttcccacggcaagtcctccgcggaccgtgaactggtattccgcctcatcgatgccgctttcgggcagcgccgcaagaccttgcatgccgcgctgaaaaccattgttcccgccgaagcgttcgcagcggcgggcattgacccgacccgacgcggtgaaacgctgacggtcaccgaatttgcggcattggcggcagcggttcaatccacatcacatgccacgcctaccactgacgaggtggagcaatgattccggtagccgtccgtcaacgccccgcttatgacgatcaattggatgagccggcagcactgaccgtgcgcgtggattgcccggccaagaccaacctcaccctggaggtcggcccgacgcacgatgaatggggcggtcgtcacgaactggacaccatctactgtgccatcggggtatatgacaccattaccgccaccgccaaacatccgggagccggctcctcgctggaactcgaaggcgcgcatctgggcgatttggcctcatccagcagcgacatgcgccgcaaccacgcggtcctggcattattcgccatggcccaggcggccggccgcgattccgatgtggcattgaccatcaccaaacgcatccccgtaggcgccggtctcggcggcggctcggcagacgcggccgcaaccatactggccgtcaatcagctatgggaattacactggccaatggaacgcctgcgtaccattgccgccacactgggcgctgatatgccattctgtctgtccggcgggttcgcgcacggcaccggattcggcgaacgcatcgaggtcattgatgcaggcagtgccgcagaacgcaatctcatcggccaaggatatgccggagaggtactggtcggcgcgtatcagtcgcagctcagcactcccgaggtgtatcacacgtttgatgcggtcggtcccggcaatgacgatcgcaatcatctgcaggcggcggccatcagtctgcatccgcgcagtggtcaggccattgacgccgctgtgaacgccggtgcccgtcatgcattcgtctccggttccgggccgtcggtggtggctttcgtaccggacagcaccacagcgcagcgcattatcgacgcctggcgcaacggcggtatggtcgaccgcattatcaaggccagtgcaccagcgcaccccattatcggagtcagccagtaacgctaatgtagcaacaagccacatgatcatgaaggaagtctaacgatgacgcagcaaattgatgaacggcaggcacgcaagacatatgtacgccaccgccagaccatcgtgttctccatcagtggcgtagtgcttgcagccattctggtggttgccattctctttaatttccatgtgttcggcctggggcagattaacacaccggccaccgcgccaaactacggcaatgccgctccctgcgctgtcaagggcgatgatggcaaggcaacgtacgtggccaatggaactgtcggcgtgcgtgtgatgaacggcaccgagcatagccaatttgccgcagcggtcagcaaggcactggaagcccgcggtttcgtgatgcaggaggcaaccaactactccagcaccaacgtcgaacgcaccactatctactttggcaagaacgccattaatcaggcctacactgtggccggcaacttcaccgatgccgccatggtgatgaacgcccgcgaggaccagcttatcgacgtggtgctcggcgctaccttcaacgatctgaaagatgagaagtcatccccgcaggaaggcaagaaaatcactgatttcacggggtgcgtggccgccgataagatgacgaatcttcccgccgatacgcagcacaccgcttacccggcgcagtaatcccactttggctcccgctggcgggagctgtcacgaagtgactgagggtggtttatataacatatgttgaccaccctcagtctcactccgtgagccagctcccaccagcgggagctctcatttatgcattacgcctctatctcggcgtaccagcgcatgagttcggccacggcaacatcgtgatccaccgggccgttatccagacggtattccagcatatgcttgtaggcgcggccaatcatcggtccgggctccagacccaagagttccataatctcgttgccgtccacatcagggcgaatggcgtcgaaatcctctttcttcttgagctcgcgaacacgcgcctccatctcatccatcgcctgggagaacaccatcgccttgcgcttgttctgcgtagtggcatccgcgcgagtgagtcggtttagacgctcatacaaatgcccggcatccttgacataacggcgcacggcagaatcggtccacggctcatccacgtacccgtggaaacgcaggtgcaggttcaccagttccgagacgtcctccaccagatgatgatcgaatcgcagagccttcaaacgcttgcgggtcattttggcacccaccgcatcatgatgatggaagctcaccttgcctcccggctcgaaacgtcgggtcttcggcttgccgatatcatgcatcactgcggccagacgcaacgtgaggtcaggagcgggcaccgggccatccgggccggtttccagagcgatggcccgttcaagcacgatcatcgtgtgctcaaagacatctttgtgccgatgatgctcgtcaatctgcaactgcaacgccggaatctcggggaacacgatatccgccagacctgattcgaccagtgcttccagccctgcgcgagggcggtcagacaacagcatcttggtcagttcatcacgtacgcgctcggcggatacaatctcaatgcgatcgcgcatcgaggaaatcgcctccgcagcatcgggagcaatggaaaagcccagctgagccacgaatcggaccgcacgcatcatacgcagaggatcatcatcgaatgactggctcggatcaacaggagtacgcagcacgcctttggccaaatcgctggcaccgccgaacggatcaacgaattccagatcgggcacacgcagggccatggcgttgacggtgaagtcgcggcgtgagaggtcaccttcaagcgtgtcgccataattgacttcaggcttgcgcgaatccggatcgtaggtatccgaccgataggtggtcacctcaaccttgacctcggtgccgtccgcacgccggcgcatggcacccaacgtaccgaacttgcggcccatatcccaaaaaccgtcatgcccccaacggcgcagaatgggctcgaactgttccgggcgcgcggatgagcaaaagtccagatcgtggctcttgcggtgcaggagcagatcgcggaccgggccgccgaccaatgccagctcataaccctgttcggcaaacagtcgaccgagttcgatggcctcgggccacacttcgaaatccaatgggcaccttcccgtatgtgacatttttctgccttaccagcataccgttaccccacctgcacacggggttgagtaaggtggagaatatgattacgcccgccgatcttgcccgcatgcttgggcaaacacccgattcgacggacaaccatacccaagaccagctgctgtatacgtctcagacgccgcagaattccgccgattccgcgcaatccgacgacactatggacaacgtagccggcactgacacgcagccggctgaccacactgataaaaccgaacgttccatgccgacgccggcaaccgtgtttggcatgcatgccacggttaccatcgccacctcaagcgaaaccatcgaggggcaagccgacggcattgacagcgaggccgaaaccgaatcgatcgcgcagagcagcatcgaaaccgagacatcacccgctccgattcatcaggaaccatcgcagcccattcatgcccaaaccgggccgacgccggccaccgtattcggccgacgcgccgccgacacaacaccgactcccactggcccgacaccggccatgatgccgcaacgccgcacttccgacggccccaccacgtttgcgtccctggatgcacaggaactaccggtggtacgcgaatattcggctggcggactgatcttcgacgatcagaatcgcgtggccatcatcgcccgtcattctcgttccggccatctggaatggtgcctgcccaaggggcatatcgagaagggcgagactccacagcagaccgccgtgcgtgaagtgcacgaggaaaccggcattttgggcgaggtcatcgattccatcgccaccatcgactactggttcaccggaaccacgcagcgcgtgcacaagctggtgcatcactatgccttgcggcagaccggcggcgagctcaccgtggaaggcgatccggatcatgaagccgaagacgccatctgggtgcggttcgatgatttggacgacgtgctgagctaccccaacgagcgcaaaatcgcgtggctatacgccagaaagaagaacaggcaggcaaacgagtgaacctacccgcagtcttatgccgctcacgccatggtggacgattcgtacgcgcgtttgcggccattcttgtcatcacggcgatgctggccgccccactgaccgcatatgccgatgattcgcctgatgatcaggccggtcagaccatcgccatcgagcagagtacgcccatagtcaccgcttcttccggattccatatcacggtagcgattaccaatgcctcatcggatacggcaccggcggggtcactgattctcagcacaaattcacggttcacattcgtctcacgcactgatatgcagaaatgggcggaaggcgataccgccattcccaccccggatgtgctcggcagcattgatgttcctgaaatcacgccgggcaacactgcaaccgtcacccttgacgtggcggccgaccagcaggctctgcagagtatgcgcagctggggtcccaagcccctgcagttgtcgtacagtgccggaaaccagccgccaaccatgctccccagcttcctgacccgttctcctgacgggctcgacaccgcgcagactccggcgatgaacctcaccgtggcgatgccgctgaccaccactgactggcaggttgattcctccgcgctgtccggccttgtctccgaagatgagagtgcatccgcagagccggtgttatcggcgaaccagcaggaaaccaccacggtcaaggaactcaaccagaccttggccaaacaccatagcctgcaagtggtggccgatccgttgtatttccaggaactcccctccgataccagacctgccgtcgcgggagtcatgcaacccggtgattttgatgtcacggcgtatgcggcgctgaacgatgccgatgcctataccagagccggcatcgccgacgaagcatggaacgccgaacaggcgcagacgttgtatgctgtggccaaatccaccgtcacgccgactgccacctatgcctggcagggatccggcacgtggagcctggacgccctgaccaaggcccgagctcagggatataccaccgttattgcggattccacgtttgacggtgagcaaaccgacaccgtgcataccggcacctatgtggtcaatacctccgccggagacatcaccgtgctcaaggaacagtcggaactcggcacgttggcgcatggcgaagctaccagcgcacgggcaacggccgaagccagcgatgcgggcaggctggccagaatgctcgcacaaagcgcgttctatcaaatggaacagccgtatgccacccgaaacctgctgatgaccttctccaggaatagcagcgcgtcatggatcaatcaggtcatgagcgctatggaacaggcatcgtggctgaatctgactgatctgaacactatggccgctgccgacccatacagcgtcagcagcgaggtgaaccaggacgactccaatgccgccgacgtctcccaaacccgtgccaccctggagcagcttgcttcaagtcgtaaggacatcctgcggctcgccacttccatactgaagaagggtcttgatgaagacgatgtctcatcgttgaacccgcaggcacttgcccgtcaagatgccagttcaaccgccagccacaccaatgatcccgcacaatgggtgagcacgctgttgaacgcgcatgacgacatcgctctgcatgcgttcgccggctccagcgatgccgagtatcagagccagatagccaaagccaaccggacgttcgccgatacggtgttgggcagcgtgtacatcaccccatccgaatcggtgtcggtattcagcgaatcggcccagatgccggtgacagtaagcaataagctgccttacgccgtcagcgtcaaggtcaattcgatcaccgattccatgcaaatcgtgacctcccgttccaatgatgttgtgattcccgcacgtagtgaggctcaggtgaccttcaccatccgtgtgtccacttccggcaccaccgtcgcacatgtgtcgttggccgatcggcacaacaccgccttcggcaacacacaggacaccaccatcaccagtgtgctgcgcatcagcgatgccagtggtttcgtcatcattggttttgcagtactgctgggcctcgttggtttatggcgccagttcaaccgtaagaaggatcctgacgaatgagttctaccgtaggccgcaattccctgattatggcctccggtaccgcggcttctcgcgtgaccggccaaatccgcactattttgctggcggcagccatcggcactaccggtctggcggccaatgcctatcaggccggtgcgatgattccgcaaaccgtgttcacactggtgtccggcggtattttcaatgccgtgctggtgccgcaaatcgtgcgcacgttgaaggagaaggacgctcaggagcgactgaaccgactgatcaccctggccatcggcattctgctggccgtcaccgtggtgatggccgcagccacaccgctgctggcgcgtctgtacgtgggcagcagcaatcatgagatgattgccctgaccactgcgttcacgctctggtgcatgccgcaggtgttcttctacggcctgtatacggtgcttggtcagattctggccgccaaagatcattttgcctcctatgcgtggagttccaccggggccaacgtcatcagctgcgccggattcaccgcattcatcatgttgttcggcaaggccaacgaacaaccgcttgatttctggacctcgggcaaagtcgcgcttaccgcaggtacatggacgctcggcgtggcttttcaggcactgatcctgttcgtgccgttgattcgcctgggcttcaaataccgtcccagttttggcttgaccggctttggtctcaaggcaatgggaccagtggcgctgggatcgctgggtgtggtggcgattactcagatttcggatatcgtgctgacccgaatcgccacgctggccccacagcgtgcgcatgagctcaccggagccagtctgtacgacgttgccggtaacgccacctaccaaaacgccttcaccctgtacatcctgccgtattcgctgattgcggtatccgtctccaccgccgtattccccctcatctcgcggtcgatagcagcgcaggacttccatgcggcacgtcagcagctgggcaatgcgctgtgcaacgtggggctgctggtgctgttctttgcctcggcgctggtggtctaccctgaaccaatcattcgtgcgctgctgccttcggtctcgatgaatgagaccgtgctcatcgcctacgccctgattccgctgtcttgcggcatccccgccatatcggcgttcctgttgattcaacgtactttctatgcctttgaggatggcctacgcccgttccttgccgcggtattgcaatacggcttcaccacggcactcatgattgtcggcatgctggtgcttccgccgaatcggtggatcgtgggtattgcctgttccgtatccgccggtgtgctattggcgctgccgttcatgctgtttatgctgcgcaaacgattcggcggcagcctggaaggcaagccggttgtgcagacatacggcaaggcgttggcagcggccgtaatcggcggcgttgtggtctggctggcgaaaacccctgttgcagacctcttcggtgcctccatccaagagaccggcggccagatgagctggctgtccgcattgggaatctgcatcgtactgactctcgtgctggccgtggtgtatatcggcgtgctctgggcactgcgcgccacacaactgaccgatgccgtccactcgataaccgcccgtttcaggcgaaaacccgccaacacatccgttgacgaaccgcaatctgaagaagacaataataatgctgatactgctgcgagcatcatgcctgaggccgatggcattcaggccagtcccacggctagaatgtcagcgatgacgaatgctgatcacatggagcctgacgagcagatgaaaccgcaattgggagatactatccttaaccgctacaccttggtgtcttcgttgcgtaaggaacccggcctcgaggcttggcaggccaatgatcgcgtgctggcaaaggattgccagctgttcctagtgtccaatcgcaaggcattggacacggtcaacaccattgccggcgagcttgcggccacccgccccgagcactatgtgccggtgctgaagtaccgcgtacagtccgatgtgctcattgccgtcaccgcaatggacagtggcctgtctgtggccgattaccgtgccagtgccaccggcgacatactgagctacgacgccatgcgctccattcttggcgaaaccgttcaggccatccgccccatgctgaccagtaccgccggcactgccatgctgaccactgataccgtgcgtctcactgcctccggcatcgagatttccgatgctccgttcgctccgattctggcagatatgtccggcaccgatccggcaaacgatgatggcgccgagcgtcatgccgtgcgtcagcttgctgcgttgctatatgcactgctcaccaacacgaccagccaggtagatccgcaattcgatctgcatctgcttgggcaggatattccaagcgagttccgtgttatttgcaagcgtggcctggcattggccgatgaaggcgagcaggtcatgccgatggcctcactggccgaactggacgcactgttgggtgattggaagccgctgactgagctgtcgagcactgacatcgctctgccgaccactgacggcgaatcctccatcgtcaaggtgcagctgcgccctacggacgaggccgacatcgttccgattcctgatgacattgtcaccagccagcagctgccttcactgtccatcgcggcacctgcagtggccgctggtgctgaatccggcaccaatggtcaggcagatgctcatagcattttcgacttcaatttctcgcaagcctgggaaaaggagaacctctccggcgaagacaccggagactggtacaaccgactggctccgaccaactcgaccggtaactcccggctgaccgtgccgattcccaccgcggccggcgtgcctgaacccaccgctgctgagaccaccagccgtattccgatttttgatgcttccggccgtgaaatccgccctggtgaggagtcgcagcgcgcgctggaggaagagcaggcacgtgcggcggaagtccagtccgtgccgccgagctttatcccgaaggatcatcccactggcaatgaggatgatgccctgccagacgagacgcttttcggatcgatgaccaccaagtttgttgccattatcgtggccgtgattgtggtggttgccgcagcgttctgggccatgcatgcgttgcagcgcagtggggaaaaccctgcagatgcggcgaactcttctgagaattcggaaggcaattggccggatgtcaatgtggatgatgtgccgttcggtgaggaagatggcacttcctcgtccaaggattcctctacgtcttcatctcaggagaagaccgaaaccaagacagagacggagacgaagcccaagaaggtcaccgaggataaggactcccagtcggtgcccaagccgcgtcacgagaacaacaccgcctttacggtggccagcgggaacttcctgtctaaccctgccgggcagtccggttacggctaccacgtccatcttgaccagcctcatgatgtgtaccgcatgaatatcaccatccgcacatctggcggcaagggctatatccgtgccaataccacggaggatccgacccaaggcgaacaggtggccgagtttgtattcgccgagggcggtaccactgaggtgaagttcgataaggtcgtcaacacacaggatctggttctgtgggtgccgctggatagcctgccgcagaaccagctgtacattcagaaggttgaagtcttctaaaagtcgcgactatgccggcaacgtcacgctgttggcatagaggtgtctattggctttcggatgacgtatgctgaatgccattgcgccacataacgtgctgcctgccgctaccgacggcagtcggctgcagactacataatagacactgtgtctaattattggagtgagcactgcacttcataacagacggaggggaatcatatggaacataacgtcatcatcatcggctcaggtcccgctggatacacagcggccatctaccttggtcgcgccggattgaatcctgtactggtcaccggcgctctggccccgggcgggcagctggtgaacaccacggaagtggagaatttccctggtttccctgatggcattatgggtcctgatttgatggatcgcatgcgcgatcaggctgagaaattcggcacgcagttcattgccgatgatgtcgaatccgtggaacaggtggaggccgcagatgccgctgacgcaccgcagcccctgtaccgactgagcctatctgacggctcggtgttggaatctcgtgccattattgtggccactggctcgaatttccgtaagcttggcgtacctggcgaacgcgaactttccggtcatggagtgtcgtactgcgccacttgtgacggtttcttctttaaggacaagcccattgtggtggtcggcggcggtgattcggcgtttgaagaagcactgttcctgaccagatttggctcatcagtcacgctgattcatcgtcgtgattcgttccgcgcctcccagatcatggtggaccgcgcacagtcgaatcccaagttgaccttgctgaccaataccgtggttaccgccatccacggaagcgcctcggaagcaaagcccgcctccccggccattaccattggcggcctgaagctgcccgcggccacggctccccaaaacgtgagcagcattgatattcgtaatacggcaaccggtgagactgggactttggataccagtgcggtattcgtggccatcggtcataccccggctaccgagttcattgccgatgtggtcagcactgatgatgatggatacatcacggttgcagaagccggtacacacaccagcgcccctggcgtttttgccgccggtgattgcgtggatcgcacctaccgtcaagccattagcgcagcgggcatgggttgccgcgccgcattggatgcccagcagtatctgaccgcatagttggtagagcattactcagtaatcagatatacacaatggcgcagtacggatgaattcgtactgcgccattgtgtatatctgatatatcagacgtgatgccttacagccgtcttatctcacacccacttgccgtcggtgctggactgattgggcaccagcaactgcaggatgcggtccatatcttcaggggacgagaatacgatttcaatacggccatgtttggcgctgcccttgatggagaccttggtatcaaaatgattttccaggctctgctgaatggcggatcccatccacggattagtctttgaagtcttcggcttcttaggctgctctcccgaagcaacggccatagccacgatttcttccgtactgcgaaccgacaatccttccgcgatgatgcgagatgccagcttatccatcgcttctggaccgctcagacccagcaaagcacgcgcatggccggacgagagcacgccagcggccacttttttctgtactgttgccggcaggttcaacaaacgaagcgtgttagcaatctgaggacgtgacttcgaaatcgatttcgacagctgcgcttgagtcagaccaaactccttaatcatctgctgatatgcagctgcttcttccagaggattcaatgccacacgatgcaaattctccagcaaggcatcacggagcatatcgtcgtccgtggtggttttcacgatggctggaatcgtggtcaatccagccagctgagaagcgcgccagcggcgttcgcccatgatcagttcataggggctgtccagatggccagtgaacgggttcgttgaagactgctcgccgggctgtgcttgtttggcctcggcaatctgctcactgggacgacgacgcaccacgatgggttgcaatacgcccacttctttgatggaagcggcaagctcattgagctcgtcttcatcgaaaatcgtacgcggctgatgcgcattggggccgatttcctgcaagctgagttcagcgagatagccgccttcaacgggcttcagttcctctggagcctcttgtttgttggccttatcctcagccgcatgcttgttcttcggtgtttcacgtgaaacattgttcgatgatttcgttgcggctcgagtggttggcttatcgtcactgccgaagaataggtcactcggatgtgcgatatcgtccaacgcgggcatggccgctcgcttgccaccagttttcttgacagcagctcccttcttgggctgtgatggagtcgttgcggtcttggacttaggcttcaccgcttcatctggtgccttcgcgagctccgcgggatcctcctcccctggcaatgcagggaataacgcgccaagtcctttaccgagtcgtgatttggttgccattacttcctcctcgcatcaatggcttcaagcacatgctgtgaacgtcgagcgatttccaatgccgcttcgccatatgctatggcacctatgccgcggggatcataggcaataacaggctgtgaaaagctcggagcttccgatatcttcaccgatcggggaacggtggtatccaggacaatattggggtaatgggacttgacctcaccataaacctcacggcttaacagtgtacggcggtcgaacatcgtgaccagcatggtggagaccagcagaaccggattgaaatgctgctgcaccaggccgatggtgttgatcagctggcccaatccctccaacgcatagtattcggcttgaatggggatcaacatctcagtgaccgcgcacatggcgttaattaccagcaaacccaagctcggagggcaatcgatgaacacgtaatcgtacgcggtatctgtctgttccagaaaacgatcgagcgcttctttcagcaacgtgttacgattcggtaagtccgccacttcaagttcggcaccgctcaaatcgatggacgcaggaaccacatcgagcgaagaaaaatcagcgcttgtcgtgatgacatccgcgatttccgctcgcccttcaattacatcataaatcgacctatctcctgaagaatgtgaaacagcaaatgccgttgacgcattgccctggggatccatatcaatgaccaacacatgcgctccgtgctgagccagcgctgcggcaaggtttaccgtcgacgtggtcttaccgacgccgcctttctgattggccacggcgatcaagcgtgtccgtttcggcttgggaaaggaggcatgggtcaaagcgtcatatcgggagctttcgtcggccatctgactacccagcgcagaactctgcccatcaaaaatacgacggagggtttcggaaggcgattccatcattgtgtcatgatgatcgtctgctgtcatcgttcctccttattcaatgtacgttccagtgttcctattcgtatggacatgatttgtgttatccacatcccctatcccctattgtggataagtgtggacaagtggataaccacaacggtcacatctacaatccaccatcgcaaaagtgaggtttttcaacggttttcaccgatacccaccataggggatagagttgtggataactcaattcatgaagtacaaatgtggataacttcaacatcggtaccatcatcaacgtttgtcaacaattaccacatgtgtcggttccagacctggaccgacctccgcttccaccactcggggacgacggccaccatagcgtgaaatctggccactggctttgtccagttccgcttgtgccgaacgacccttgagcgcaataagccgaccggtgggtttcagcagaggcaatgtccatccagaaagcttggtcatcggtgccactgcacggcaggtcaccactgcaaaaggatgcatctcgcgcttgcgaaccctattgatcacttcatcggaacgaccacggataatagatacattcttcaaccccatcagatcaacgcactcggcaagccattcaacacggcgttccatcggttcaatcagcgtaaaactgcactccggcaagcaacacgccgtcaccagcccagggaaacctccaccactgccaacgtcagcaacggttctaaaacgagctccatctgtggccttgcgcacataaggaactatcgctgcggaattgagaatgtgacgttcccaaataatgtccacatcacgaggtccaatcaagccgcgaggttctccctcttgggagagcttgtcatggaatctctctaatcggggtaaagcatcccccaatacacgggccagcaccggcgattcctgtaactcatccaccatgacagtcccctcctatgtttcacgtgaaacatgtggcataacttgaggcgccgcttataacgacgcctcacatatcaccgcacagaaaacttcagcatatacctttgtggtgcaggtgtatactcactcctgatcgtcgacctcttcttcttcgacgttatcttcgttcttgttacgaagatatacagtcacataacgatgcggttcttcaccatgggagcgagacttcagaccttcatcacgcaccacgtcatgaacgactttacgctcaaaggaattcatcggcttcagatccatcggttcgccgctctccttaacggcatcaatagcatcgagagccacatcgcgcaggtgctggcgcttacgcttcaggaaaccatccacgtccacaatcaggtgggagcgttcgccggtcttctgctgcacagccagacgagtaagctgctgcaacgcatcaaccacttcgccattgcgaccaatcagatgtttgatgtctgtatcgtcatcagcgacgatctgaacagttgggcggttgttacgaacacccatttcgatatcgccctcatagtcggcaatatccagcaagccttcaaggtaatcggcagcgatgtcagcctcttcgttgagctgatcaatcgacgtcacgtcatcctgtgccatacgctactccttcatgtcaggtctgattctcaagtctaagccctgctcccccgaacaggattggttagtgtcggggcgtgtccgatgtttcacgtgaaacatcggacacgcccccgtcctcattatttctttctgcgcttacgaaccggctgttgcctctggaatccttggttcgccttacgcgcggcttcttccttagccttagccaaagcctcctcttcaagggaaggaagaccggccttttcacgacgagcattctcgttgcgatggtcacgcttttccttatcttctgcggcaggagaacctggagtcgggaagcaatacacctgccacagcgtacggcacaagttgcaaacgttgttggtcagccagtacaccaacacggcgaacgggaaggaagcacccgagaagatgtacatcaccgggaagagccacagcatggccttctgcatggtctcggtctgcttgttcatcgaagcagctgccatgttgcgcttcatgttgatgtactgcatgagccacaagcagaagcacatcaggaacacaaagacaccgatgaccaccttgccggcagtagctgcacgggtgaagttatcggtcacactgacaatgccgaacacatcggtctgggtgaactgcttggcggtggccacatcaaaggcaccgagcggatctcgcttgccgttggcgatgtatggaatggcggacagcgtgtagaacatggacatgaacaccgggccctgaatgagcatcggcaggcaggaacctgccggattgacgttattgtcctggtatagtttcatggtctcacgactcatggcttccttggaagcctgatccgtcttgcccttgtacttgttctgaatgcgctgcatcttcggcgccaatgcctgcatcttgcgcatcgacttcatctgcttgtagaacagcgggaagatacacgcctgcaccaccagcaccaggatgataatggcaagaatccaggagacgccgaccgggctcatgcccaacatgacaaagaagtcatgcacgatcttcatgatccaagtctgcagccactcaacaggggtcagaatcttgtacaggaatccccagaacccgctatccagcaggaattggttttgattgatcatcgttgggcctctctttgggttgtggccaatggcgtcagtcgaggctcctcatgagccttcgaccacgaaaatcgataaaaaatggaataacgttgtggcacgtcgtcaattcccccacggctccacggcctgcaacgaagcaatcgcaatacggcaagcactccgcctttgcaagcgccataccgttcaaaagcctcaatggcatagtttgaacatgttgggtaatacttgcaacagggcggtcggttcgcagaaatgtgacgctggtaccaacgtacaccacgaatcattaccgccctgatggaagtagacatgtgtcattccgccttacgagccactttggcaaagccggtggcaaactgctcatccaacgatgagaacgatgcggatgccgcacttggttttgcgcgcaccacgatatcgcagtaaggcggcaggctctcttcatgagccttagccagaaccctgaacctgcgcttcaccgtattacgggtaaccgcattgcccaccgatttggagacagccaaacccagacgacgatacgtcgtccgatcatcaggttgatgatcattacgcatcaggtaatgcacaatgatgtctttgccacccactttgcgccggcgtttaagtacggcaacgaaatcacgatggctttgcagccgctccacctcgacagcctcgaggaactgatccgagggatcaggcggacaggctcttgcggcccttggcgcggcgacggttaatcagcgcgcgaccggaacgagtgcgcatacgcacacggaaaccgtgcttcatgtgacgacgacggttgttcggctggaacgtcctcttcatatcaattgctcctaggtctatttggcaacgcttcgcgctgccctcacgtgagtcaagctataccaacctactctgacccctaccctcaagtcaaaatacgtcaagagttttcacatttcgacacgtcgaggaaatctcggctcacctctttgaatcggcataaactcaaccatttcaccccaaaagttatccacaaattacatgtatgttattcacatttgagcaattccaacacgcgactcggtggataacttcctcacatcggagtaaacattatctacgtaattcattcgttgagtagttcagaaggggccgacc
